United States Patent Application Publication US 2025/0297309 A1 - sequence listing, part 3

SEQ ID NO: 58552 - RNA, 22 nt, Synthetic Construct
  source 1..22: mol_type = other RNA
tattgtacttgtcccggcctgt

SEQ ID NO: 58553 - RNA, 22 nt, Synthetic Construct
  source 1..22: mol_type = other RNA
tattgtacttgtcccggcctgt

SEQ ID NO: 58554 - RNA, 22 nt, Synthetic Construct
  source 1..22: mol_type = other RNA
tagcagcacgtagatattggcg

SEQ ID NO: 58555 - RNA, 21 nt, Synthetic Construct
  source 1..21: mol_type = other RNA
tgaggtagtagtctgtgctgt

SEQ ID NO: 58556 - RNA, 35 nt, Synthetic Construct; identical to SEQ ID NO: 9871
  source 1..35: mol_type = other RNA

SEQ ID NO: 58557 - RNA, 35 nt, Synthetic Construct; identical to SEQ ID NO: 9871
  source 1..35: mol_type = other RNA

SEQ ID NO: 58558 - RNA, 24 nt, Synthetic Construct
  source 1..24: mol_type = other RNA
tagtgcaatattgcttatagggtt

SEQ ID NO: 58559 - RNA, 21 nt, Synthetic Construct
  source 1..21: mol_type = other RNA
tgaggaagtagattgtatagt

SEQ ID NO: 58560 - RNA, 21 nt, Synthetic Construct
  source 1..21: mol_type = other RNA
tgaggaagtagattgtatagt

SEQ ID NO: 58561 - RNA, 23 nt, Synthetic Construct
  source 1..23: mol_type = other RNA
aacggaatcccaaaagcagctgt

SEQ ID NO: 58562 - RNA, 23 nt, Synthetic Construct
  source 1..23: mol_type = other RNA
aacggaatcccaaaagcagctgt

SEQ ID NO: 58563 - RNA, 22 nt, Synthetic Construct
  source 1..22: mol_type = other RNA
tactgcacttgtcccggcctgt

SEQ ID NO: 58564 - RNA, 22 nt, Synthetic Construct
  source 1..22: mol_type = other RNA
tactgcacttgtcccggcctgt

SEQ ID NO: 58565 - RNA, 21 nt, Synthetic Construct
  source 1..21: mol_type = other RNA
ctagactgaagccccttgagg

SEQ ID NO: 58566 - RNA, 21 nt, Synthetic Construct
  source 1..21: mol_type = other RNA
ctagactgaagccccttgagg

SEQ ID NO: 58567 - RNA, 22 nt, Synthetic Construct
  source 1..22: mol_type = other RNA
tgaggtagtaggttgtattgtt

SEQ ID NO: 58568 - RNA, 22 nt, Synthetic Construct
  source 1..22: mol_type = other RNA
tgaggtagtaggttgtattgtt

SEQ ID NO: 58569 - RNA, 23 nt, Synthetic Construct
  source 1..23: mol_type = other RNA
gggagccaggaagtattgatgtt

SEQ ID NO: 58570 - RNA, 23 nt, Synthetic Construct
  source 1..23: mol_type = other RNA
gggagccaggaagtattgatgtt

SEQ ID NO: 58571 - RNA, 27 nt, Synthetic Construct
  source 1..27: mol_type = other RNA
ccccccactgctaaatttggctggcta

SEQ ID NO: 58572 - RNA, 28 nt, Synthetic Construct
  source 1..28: mol_type = other RNA
gcggtataccgaagctctaggtgcggca

SEQ ID NO: 58573 - RNA, 28 nt, Synthetic Construct
  source 1..28: mol_type = other RNA
gcggtataccgaagctctaggtgcggca

SEQ ID NO: 58574 - RNA, 23 nt, Synthetic Construct
  source 1..23: mol_type = other RNA
taaggtgcatctagtgcagatag

SEQ ID NO: 58575 - RNA, 26 nt, Synthetic Construct
  source 1..26: mol_type = other RNA
aaaccgttaccattactgagtttagt

SEQ ID NO: 58576 - RNA, 26 nt, Synthetic Construct
  source 1..26: mol_type = other RNA
aaaccgttaccattactgagtttagt

SEQ ID NO: 58577 - RNA, 23 nt, Synthetic Construct
  source 1..23: mol_type = other RNA
tcctgtactgagctgctccgaga

SEQ ID NO: 58578 - RNA, 23 nt, Synthetic Construct
  source 1..23: mol_type = other RNA
tcctgtactgagctgctccgaga

SEQ ID NO: 58579 - RNA, 22 nt, Synthetic Construct
  source 1..22: mol_type = other RNA
tagcagcacgtaaacattggcg

SEQ ID NO: 58580 - RNA, 23 nt, Synthetic Construct
  source 1..23: mol_type = other RNA
naaagtgctgttcgtgcaggtag

SEQ ID NO: 58581 - RNA, 22 nt, Synthetic Construct
  source 1..22: mol_type = other RNA
tgaggtagtaggttgtgtggta

SEQ ID NO: 58582 - RNA, 22 nt, Synthetic Construct
  source 1..22: mol_type = other RNA
tgaggtagtaggttgtgtggta

SEQ ID NO: 58583 - RNA, 31 nt, Synthetic Construct; identical to SEQ ID NO: 13805
  source 1..31: mol_type = other RNA

SEQ ID NO: 58584 - RNA, 27 nt, Synthetic Construct
  source 1..27: mol_type = other RNA
gttggttcaagcgtgtagtcgtgctct

SEQ ID NO: 58585 - RNA, 23 nt, Synthetic Construct
  source 1..23: mol_type = other RNA
tgtcagttcgtcaaataccccaa

SEQ ID NO: 58586 - RNA, 22 nt, Synthetic Construct
  source 1..22: mol_type = other RNA
tgaggaagtagattgtatagtt

SEQ ID NO: 58587 - RNA, 22 nt, Synthetic Construct
  source 1..22: mol_type = other RNA
tgaggaagtagattgtatagtt

SEQ ID NO: 58588 - RNA, 24 nt, Synthetic Construct
  source 1..24: mol_type = other RNA
tcctgtactgagctgccccgagtt

SEQ ID NO: 58589 - RNA, 24 nt, Synthetic Construct
  source 1..24: mol_type = other RNA
tcctgtactgagctgccccgagtt

SEQ ID NO: 58590 - RNA, 23 nt, Synthetic Construct
  source 1..23: mol_type = other RNA
tctcccaacccttgtaccagtga

SEQ ID NO: 58591 - RNA, 23 nt, Synthetic Construct
  source 1..23: mol_type = other RNA
tctcccaacccttgtaccagtga

SEQ ID NO: 58592 - RNA, 39 nt, Synthetic Construct; identical to SEQ ID NO: 4400
  source 1..39: mol_type = other RNA

SEQ ID NO: 58593 - RNA, 39 nt, Synthetic Construct; identical to SEQ ID NO: 4400
  source 1..39: mol_type = other RNA

SEQ ID NO: 58594 - RNA, 23 nt, Synthetic Construct
  source 1..23: mol_type = other RNA
cgaagtgctgttcgtgcaggtag

SEQ ID NO: 58595 - RNA, 23 nt, Synthetic Construct
  source 1..23: mol_type = other RNA
cgaagtgctgttcgtgcaggtag

SEQ ID NO: 58596 - RNA, 23 nt, Synthetic Construct
  source 1..23: mol_type = other RNA
tcctgtactgagctgccccgagc

SEQ ID NO: 58597 - RNA, 23 nt, Synthetic Construct
  source 1..23: mol_type = other RNA
tcctgtactgagctgccccgagc

SEQ ID NO: 58598 - RNA, 22 nt, Synthetic Construct
  source 1..22: mol_type = other RNA
cgaggtagtaggttgtatagtt

SEQ ID NO: 58599 - RNA, 22 nt, Synthetic Construct
  source 1..22: mol_type = other RNA
cgaggtagtaggttgtatagtt

SEQ ID NO: 58600 - RNA, 24 nt, Synthetic Construct
  source 1..24: mol_type = other RNA
tcttggagtaggtcattgggtggt

SEQ ID NO: 58601 - RNA, 23 nt, Synthetic Construct
  source 1..23: mol_type = other RNA
caacggaatcccgaaagcagctg

SEQ ID NO: 58602 - RNA, 23 nt, Synthetic Construct
  source 1..23: mol_type = other RNA
caacggaatcccgaaagcagctg

SEQ ID NO: 58603 - RNA, 22 nt, Synthetic Construct
  source 1..22: mol_type = other RNA
tctttgttcgattccgttgagt

SEQ ID NO: 58604 - RNA, 22 nt, Synthetic Construct
  source 1..22: mol_type = other RNA
gtagtgtttcctactttatgga

SEQ ID NO: 58605 - RNA, 22 nt, Synthetic Construct
  source 1..22: mol_type = other RNA
gtagtgtttcctactttatgga

SEQ ID NO: 58606 - RNA, 23 nt, Synthetic Construct
  source 1..23: mol_type = other RNA
tgaggtagtaggttgtgtggtct

SEQ ID NO: 58607 - RNA, 23 nt, Synthetic Construct
  source 1..23: mol_type = other RNA
tgaggtagtaggttgtgtggtct

SEQ ID NO: 58608 - RNA, 22 nt, Synthetic Construct
  source 1..22: mol_type = other RNA
tgaggtagtagtatgtgctgtt

SEQ ID NO: 58609 - RNA, 22 nt, Synthetic Construct
  source 1..22: mol_type = other RNA
tgaggtagtagtatgtgctgtt

SEQ ID NO: 58610 - RNA, 23 nt, Synthetic Construct
  source 1..23: mol_type = other RNA
gtaaacatccttgactggaagct

SEQ ID NO: 58611 - RNA, 23 nt, Synthetic Construct
  source 1..23: mol_type = other RNA
gtaaacatccttgactggaagct

SEQ ID NO: 58612 - RNA, 33 nt, Synthetic Construct; identical to SEQ ID NO: 2266
  source 1..33: mol_type = other RNA

SEQ ID NO: 58613 - RNA, 23 nt, Synthetic Construct
  source 1..23: mol_type = other RNA
caaagtgctgttcgtgcaggcag

SEQ ID NO: 58614 - RNA, 18 nt, Synthetic Construct
  source 1..18: mol_type = other RNA
ggtgcaagcgttaatcgg

SEQ ID NO: 58615 - RNA, 22 nt, Synthetic Construct
  source 1..22: mol_type = other RNA
tattgcacttgtcccggcctgc

SEQ ID NO: 58616 - RNA, 22 nt, Synthetic Construct
  source 1..22: mol_type = other RNA
tattgcacttgtcccggcctgc

SEQ ID NO: 58617 - RNA, 32 nt, Synthetic Construct; identical to SEQ ID NO: 4279
  source 1..32: mol_type = other RNA

SEQ ID NO: 58618 - RNA, 32 nt, Synthetic Construct; identical to SEQ ID NO: 4279
  source 1..32: mol_type = other RNA

SEQ ID NO: 58619 - RNA, 22 nt, Synthetic Construct
  source 1..22: mol_type = other RNA
cccagtgttcagactacctgtt

SEQ ID NO: 58620 - RNA, 23 nt, Synthetic Construct
  source 1..23: mol_type = other RNA
atgacacgatcactcccgttgag

SEQ ID NO: 58621 - RNA, 23 nt, Synthetic Construct
  source 1..23: mol_type = other RNA
tggagacgcggccctgttggagt

SEQ ID NO: 58622 - RNA, 25 nt, Synthetic Construct
  source 1..25: mol_type = other RNA
tgagaactgaattccataggctgtt

SEQ ID NO: 58623 - RNA, 22 nt, Synthetic Construct
  source 1..22: mol_type = other RNA
tcgtaccgcgagtaataatgcg

SEQ ID NO: 58624 - RNA, 22 nt, Synthetic Construct
  source 1..22: mol_type = other RNA
tcgtaccgcgagtaataatgcg

SEQ ID NO: 58625 - RNA, 36 nt, Synthetic Construct; identical to SEQ ID NO: 2469
  source 1..36: mol_type = other RNA

SEQ ID NO: 58626 - RNA, 36 nt, Synthetic Construct; identical to SEQ ID NO: 2469
  source 1..36: mol_type = other RNA

SEQ ID NO: 58627 - RNA, 21 nt, Synthetic Construct
  source 1..21: mol_type = other RNA
tgtcagtttgtcaaatacccc

SEQ ID NO: 58628 - RNA, 25 nt, Synthetic Construct
  source 1..25: mol_type = other RNA
ttgaggatatgagatcgagacgaca

SEQ ID NO: 58629 - RNA, 16 nt, Synthetic Construct
  source 1..16: mol_type = other RNA
gactacggccatacca

SEQ ID NO: 58630 - RNA, 20 nt, Synthetic Construct
  source 1..20: mol_type = other RNA
acagtagtctgcacattggt

SEQ ID NO: 58631 - RNA, 22 nt, Synthetic Construct
  source 1..22: mol_type = other RNA
ngaggtagtagtttgtgctgtt

SEQ ID NO: 58632 - RNA, 22 nt, Synthetic Construct
  source 1..22: mol_type = other RNA
tcctgtactgagctgccccggg

SEQ ID NO: 58633 - RNA, 21 nt, Synthetic Construct
  source 1..21: mol_type = other RNA
tgaggtagtagattgtacagt

SEQ ID NO: 58634 - RNA, 19 nt, Synthetic Construct
  source 1..19: mol_type = other RNA
tgaggtagtaggttgtgtg

SEQ ID NO: 58635 - RNA, 19 nt, Synthetic Construct
  source 1..19: mol_type = other RNA
tgaggtagtaggttgtgtg

SEQ ID NO: 58636 - RNA, 25 nt, Synthetic Construct
  source 1..25: mol_type = other RNA
tcgaggatatgagatcgagacgaca

SEQ ID NO: 58637 - RNA, 23 nt, Synthetic Construct
  source 1..23: mol_type = other RNA
caaagtactgttcgtgcaggtag

SEQ ID NO: 58638 - RNA, 23 nt, Synthetic Construct
  source 1..23: mol_type = other RNA
caaagtactgttcgtgcaggtag

SEQ ID NO: 58639 - RNA, 23 nt, Synthetic Construct
  source 1..23: mol_type = other RNA
caacggagtcccaaaagcagctg

SEQ ID NO: 58640 - RNA, 23 nt, Synthetic Construct
  source 1..23: mol_type = other RNA
caacggagtcccaaaagcagctg

SEQ ID NO: 58641 - RNA, 23 nt, Synthetic Construct
  source 1..23: mol_type = other RNA
ggctcggtctgaggcccctcagt

SEQ ID NO: 58642 - RNA, 22 nt, Synthetic Construct
  source 1..22: mol_type = other RNA
tgttgcacttgtcccggcctgt

SEQ ID NO: 58643 - RNA, 22 nt, Synthetic Construct
  source 1..22: mol_type = other RNA
tgttgcacttgtcccggcctgt

SEQ ID NO: 58644 - RNA, 20 nt, Synthetic Construct
  source 1..20: mol_type = other RNA
tccctgtcctccaggagctc

SEQ ID NO: 58645 - RNA, 20 nt, Synthetic Construct
  source 1..20: mol_type = other RNA
tccctgtcctccaggagctc

SEQ ID NO: 58646 - RNA, 15 nt, Synthetic Construct
  source 1..15: mol_type = other RNA
aggtgggaggctttg

SEQ ID NO: 58647 - RNA, 15 nt, Synthetic Construct
  source 1..15: mol_type = other RNA
aggtgggaggctttg

SEQ ID NO: 58648 - RNA, 22 nt, Synthetic Construct
  source 1..22: mol_type = other RNA
tagcagcacgtaaatattagcg

SEQ ID NO: 58649 - RNA, 22 nt, Synthetic Construct
  source 1..22: mol_type = other RNA
tagcagcacgtaaatattagcg

SEQ ID NO: 58650 - RNA, 23 nt, Synthetic Construct
  source 1..23: mol_type = other RNA
tggtaatacgtcgtacttagtgt

SEQ ID NO: 58651 - RNA, 23 nt, Synthetic Construct
  source 1..23: mol_type = other RNA
tggtaatacgtcgtacttagtgt

SEQ ID NO: 58652 - RNA, 21 nt, Synthetic Construct
  source 1..21: mol_type = other RNA
agaggtagtaggttgtgtggt

SEQ ID NO: 58653 - RNA, 21 nt, Synthetic Construct
  source 1..21: mol_type = other RNA
agaggtagtaggttgtgtggt

SEQ ID NO: 58654 - RNA, 27 nt, Synthetic Construct
  source 1..27: mol_type = other RNA
ccccccactgttaaatttgactggctt

SEQ ID NO: 58655 - RNA, 27 nt, Synthetic Construct
  source 1..27: mol_type = other RNA
ccccccactgttaaatttgactggctt

SEQ ID NO: 58656 - RNA, 24 nt, Synthetic Construct
  source 1..24: mol_type = other RNA
ggctacattgtctgctgggtttct

SEQ ID NO: 58657 - RNA, 20 nt, Synthetic Construct
  source 1..20: mol_type = other RNA
gctattgacgaccgtaccgc

SEQ ID NO: 58658 - RNA, 24 nt, Synthetic Construct
  source 1..24: mol_type = other RNA
gctcactgatcgagtcgtcctgcg

SEQ ID NO: 58659 - RNA, 27 nt, Synthetic Construct
  source 1..27: mol_type = other RNA
ccccccactgctgaatttgactggctt

SEQ ID NO: 58660 - RNA, 24 nt, Synthetic Construct
  source 1..24: mol_type = other RNA
agctacattgtctgctgggtttcg

SEQ ID NO: 58661 - RNA, 24 nt, Synthetic Construct
  source 1..24: mol_type = other RNA
agctacattgtctgctgggtttcg

SEQ ID NO: 58662 - RNA, 22 nt, Synthetic Construct
  source 1..22: mol_type = other RNA
tgttgcacttgtcccggcctgt

SEQ ID NO: 58663 - RNA, 21 nt, Synthetic Construct
  source 1..21: mol_type = other RNA
tcctgtgctgagctgccccga

SEQ ID NO: 58664 - RNA, 21 nt, Synthetic Construct
  source 1..21: mol_type = other RNA
tcctgtgctgagctgccccga

SEQ ID NO: 58665 - RNA, 21 nt, Synthetic Construct
  source 1..21: mol_type = other RNA
cataaagtagaaagcactact

SEQ ID NO: 58666 - RNA, 21 nt, Synthetic Construct
  source 1..21: mol_type = other RNA
cataaagtagaaagcactact

SEQ ID NO: 58667 - RNA, 20 nt, Synthetic Construct
  source 1..20: mol_type = other RNA
acccttgtcattagttgcta

SEQ ID NO: 58668 - RNA, 20 nt, Synthetic Construct
  source 1..20: mol_type = other RNA
acccttgtcattagttgcta

SEQ ID NO: 58669 - RNA, 26 nt, Synthetic Construct
  source 1..26: mol_type = other RNA
ccccccactgctaatttgactggctt

SEQ ID NO: 58670 - RNA, 17 nt, Synthetic Construct
  source 1..17: mol_type = other RNA
ggagtatggtcgcaagg

SEQ ID NO: 58671 - RNA, 23 nt, Synthetic Construct
  source 1..23: mol_type = other RNA
caaagtgctgttcgtgcgggtag

SEQ ID NO: 58672 - RNA, 22 nt, Synthetic Construct
  source 1..22: mol_type = other RNA
tgaggtagtaggttgtgtggtg

SEQ ID NO: 58673 - RNA, 22 nt, Synthetic Construct
  source 1..22: mol_type = other RNA
tgaggtagtaggttgtgtggtg

SEQ ID NO: 58674 - RNA, 22 nt, Synthetic Construct
  source 1..22: mol_type = other RNA
tcaggtagtagattgtatagtt

SEQ ID NO: 58675 - RNA, 23 nt, Synthetic Construct
  source 1..23: mol_type = other RNA
tggtaatacgacgtgcttagtgt

SEQ ID NO: 58676 - RNA, 23 nt, Synthetic Construct
  source 1..23: mol_type = other RNA
tggtaatacgacgtgcttagtgt

SEQ ID NO: 58677 - RNA, 22 nt, Synthetic Construct
  source 1..22: mol_type = other RNA
tatcgcacttgtcccggcctgt

SEQ ID NO: 58678 - RNA, 16 nt, Synthetic Construct
  source 1..16: mol_type = other RNA
ccgcttttgtcaggga

SEQ ID NO: 58679 - RNA, 16 nt, Synthetic Construct
  source 1..16: mol_type = other RNA
ccgcttttgtcaggga

SEQ ID NO: 58680 - RNA, 23 nt, Synthetic Construct
  source 1..23: mol_type = other RNA
atcacattgccagggatttccat

SEQ ID NO: 58681 - RNA, 22 nt, Synthetic Construct
  source 1..22: mol_type = other RNA
gtgcatggccgttcttagttgg

SEQ ID NO: 58682 - RNA, 20 nt, Synthetic Construct
  source 1..20: mol_type = other RNA
tgaggtagtaggttgtgtag

SEQ ID NO: 58683 - RNA, 23 nt, Synthetic Construct
  source 1..23: mol_type = other RNA
agcagcgttgtacagggctatga

SEQ ID NO: 58684 - RNA, 23 nt, Synthetic Construct
  source 1..23: mol_type = other RNA
agcagcgttgtacagggctatga

SEQ ID NO: 58685 - RNA, 23 nt, Synthetic Construct
  source 1..23: mol_type = other RNA
acagtagtctgcacattggttat

SEQ ID NO: 58686 - RNA, 21 nt, Synthetic Construct
  source 1..21: mol_type = other RNA
tgaggtagtaggttgtgaggt

SEQ ID NO: 58687 - RNA, 21 nt, Synthetic Construct
  source 1..21: mol_type = other RNA
tgaggtagtaggttgtgaggt

SEQ ID NO: 58688 - RNA, 24 nt, Synthetic Construct
  source 1..24: mol_type = other RNA
tagcttatcagactgatgttgaca

SEQ ID NO: 58689 - RNA, 35 nt, Synthetic Construct; identical to SEQ ID NO: 757
  source 1..35: mol_type = other RNA

SEQ ID NO: 58690 - RNA, 18 nt, Synthetic Construct
  source 1..18: mol_type = other RNA
tcttcggtagtatagtgg

SEQ ID NO: 58691 - RNA, 18 nt, Synthetic Construct
  source 1..18: mol_type = other RNA
tcttcggtagtatagtgg

SEQ ID NO: 58692 - RNA, 23 nt, Synthetic Construct
  source 1..23: mol_type = other RNA
caaagcgctgttcgtgcaggtag

SEQ ID NO: 58693 - RNA, 22 nt, Synthetic Construct
  source 1..22: mol_type = other RNA
tgtcaactggttgttgggaggg

SEQ ID NO: 58694 - RNA, 20 nt, Synthetic Construct
  source 1..20: mol_type = other RNA
cgtaccgtgagtaataatgc

SEQ ID NO: 58695 - RNA, 19 nt, Synthetic Construct
  source 1..19: mol_type = other RNA
acatgcaagtcgaacggta

SEQ ID NO: 58696 - RNA, 16 nt, Synthetic Construct
  source 1..16: mol_type = other RNA
ggcgggggtcgctggt

SEQ ID NO: 58697 - RNA, 23 nt, Synthetic Construct
  source 1..23: mol_type = other RNA
gactcttagcggtggatcactcg

SEQ ID NO: 58698 - RNA, 20 nt, Synthetic Construct
  source 1..20: mol_type = other RNA
caaagaattctccttttggg

SEQ ID NO: 58699 - RNA, 20 nt, Synthetic Construct
  source 1..20: mol_type = other RNA
caaagaattctccttttggg

SEQ ID NO: 58700 - RNA, 25 nt, Synthetic Construct
  source 1..25: mol_type = other RNA
caaagaattctccttttgggctttt

SEQ ID NO: 58701 - RNA, 25 nt, Synthetic Construct
  source 1..25: mol_type = other RNA
caaagaattctccttttgggctttt

SEQ ID NO: 58702 - RNA, 22 nt, Synthetic Construct
  source 1..22: mol_type = other RNA
gcagtagtctgcacattggtta

SEQ ID NO: 58703 - RNA, 22 nt, Synthetic Construct
  source 1..22: mol_type = other RNA
gcagtagtctgcacattggtta

SEQ ID NO: 58704 - RNA, 22 nt, Synthetic Construct
  source 1..22: mol_type = other RNA
acctgtactgagctgccccgag

SEQ ID NO: 58705 - RNA, 22 nt, Synthetic Construct
  source 1..22: mol_type = other RNA
acctgtactgagctgccccgag

SEQ ID NO: 58706 - RNA, 18 nt, Synthetic Construct
  source 1..18: mol_type = other RNA
gttaaaaagctcgtagtt

SEQ ID NO: 58707 - RNA, 18 nt, Synthetic Construct
  source 1..18: mol_type = other RNA
gttaaaaagctcgtagtt

SEQ ID NO: 58708 - RNA, 22 nt, Synthetic Construct
  source 1..22: mol_type = other RNA
tgaggtagtagtttgtactgtt

SEQ ID NO: 58709 - RNA, 22 nt, Synthetic Construct
  source 1..22: mol_type = other RNA
cattgcgcttgtctcggtctga

SEQ ID NO: 58710 - RNA, 22 nt, Synthetic Construct
  source 1..22: mol_type = other RNA
cattgcgcttgtctcggtctga

SEQ ID NO: 58711 - RNA, 24 nt, Synthetic Construct
  source 1..24: mol_type = other RNA
gaaagattaaggcaagaggttagc

SEQ ID NO: 58712 - RNA, 24 nt, Synthetic Construct
  source 1..24: mol_type = other RNA
gaaagattaaggcaagaggttagc

SEQ ID NO: 58713 - RNA, 21 nt, Synthetic Construct
  source 1..21: mol_type = other RNA
tcctgtactgagttgccccga

SEQ ID NO: 58714 - RNA, 15 nt, Synthetic Construct
  source 1..15: mol_type = other RNA
catgccgcgtgcggg

SEQ ID NO: 58715 - RNA, 15 nt, Synthetic Construct
  source 1..15: mol_type = other RNA
catgccgcgtgcggg

SEQ ID NO: 58716 - RNA, 24 nt, Synthetic Construct
  source 1..24: mol_type = other RNA
tgtcagtttgtcaaataccccaac

SEQ ID NO: 58717 - RNA, 21 nt, Synthetic Construct
  source 1..21: mol_type = other RNA
taggtagtttcctgttgttgg

SEQ ID NO: 58718 - RNA, 20 nt, Synthetic Construct
  source 1..20: mol_type = other RNA
ctagactgaagctccttgag

SEQ ID NO: 58719 - RNA, 32 nt, Synthetic Construct; identical to SEQ ID NO: 30748
  source 1..32: mol_type = other RNA

SEQ ID NO: 58720 - RNA, 23 nt, Synthetic Construct
  source 1..23: mol_type = other RNA
tgaggtagtaggttgtgtagttt

SEQ ID NO: 58721 - RNA, 23 nt, Synthetic Construct
  source 1..23: mol_type = other RNA
tgaggtagtaggttgtgtagttt

SEQ ID NO: 58722 - RNA, 23 nt, Synthetic Construct
  source 1..23: mol_type = other RNA
cagagtgctgttcgtgcaggtag

SEQ ID NO: 58723 - RNA, 22 nt, Synthetic Construct
  source 1..22: mol_type = other RNA
tattgcacttgtcccggcctat

SEQ ID NO: 58724 - RNA, 23 nt, Synthetic Construct
  source 1..23: mol_type = other RNA
tgaggtagtaggttgtgtggtct

SEQ ID NO: 58725 - RNA, 23 nt, Synthetic Construct
  source 1..23: mol_type = other RNA
caacggagtcccaaaagcagctg

SEQ ID NO: 58726 - RNA, 21 nt, Synthetic Construct
  source 1..21: mol_type = other RNA
tgaggggcagggagcgagact

SEQ ID NO: 58727 - RNA, 21 nt, Synthetic Construct
  source 1..21: mol_type = other RNA
tgaggggcagggagcgagact

SEQ ID NO: 58728 - RNA, 22 nt, Synthetic Construct
  source 1..22: mol_type = other RNA
tggggtagtagattgtatagtt

SEQ ID NO: 58729 - RNA, 22 nt, Synthetic Construct
  source 1..22: mol_type = other RNA
tggggtagtagattgtatagtt

SEQ ID NO: 58730 - RNA, 22 nt, Synthetic Construct
  source 1..22: mol_type = other RNA
tcccgtactgagctgccccgag

SEQ ID NO: 58731 - RNA, 27 nt, Synthetic Construct
  source 1..27: mol_type = other RNA
ccccccattgctaaatttgactggctt

SEQ ID NO: 58732 - RNA, 27 nt, Synthetic Construct
  source 1..27: mol_type = other RNA
ccccccattgctaaatttgactggctt

SEQ ID NO: 58733 - RNA, 20 nt, Synthetic Construct
  source 1..20: mol_type = other RNA
tgaggtagtaggttgtacag

SEQ ID NO: 58734 - RNA, 22 nt, Synthetic Construct
  source 1..22: mol_type = other RNA
tgaagtagtaggttgtatagtt

SEQ ID NO: 58735 - RNA, 22 nt, Synthetic Construct
  source 1..22: mol_type = other RNA
tgaagtagtaggttgtatagtt

SEQ ID NO: 58736 - RNA, 22 nt, Synthetic Construct
  source 1..22: mol_type = other RNA
tggaatgtaaagaagtatgtat

SEQ ID NO: 58737 - RNA, 22 nt, Synthetic Construct
  source 1..22: mol_type = other RNA
tggaatgtaaagaagtatgtat

SEQ ID NO: 58738 - RNA, 20 nt, Synthetic Construct
  source 1..20: mol_type = other RNA
tcccgggtttcggcaccatt

SEQ ID NO: 58739 - RNA, 20 nt, Synthetic Construct
  source 1..20: mol_type = other RNA
tcccgggtttcggcaccatt

SEQ ID NO: 58740 - RNA, 22 nt, Synthetic Construct
  source 1..22: mol_type = other RNA
tagctgcacgtaaatattggcg

SEQ ID NO: 58741 - RNA, 22 nt, Synthetic Construct
  source 1..22: mol_type = other RNA
tagctgcacgtaaatattggcg

SEQ ID NO: 58742 - RNA, 23 nt, Synthetic Construct
  source 1..23: mol_type = other RNA
agaggggcagagagcgagacttt

SEQ ID NO: 58743 - RNA, 23 nt, Synthetic Construct
  source 1..23: mol_type = other RNA
agaggggcagagagcgagacttt

SEQ ID NO: 58744 - RNA, 35 nt, Synthetic Construct; identical to SEQ ID NO: 1497
  source 1..35: mol_type = other RNA

SEQ ID NO: 58745 - RNA, 35 nt, Synthetic Construct; identical to SEQ ID NO: 1497
  source 1..35: mol_type = other RNA

SEQ ID NO: 58746 - RNA, 20 nt, Synthetic Construct
  source 1..20: mol_type = other RNA
gagtaggacgttgccaggtt

SEQ ID NO: 58747 - RNA, 20 nt, Synthetic Construct
  source 1..20: mol_type = other RNA
gagtaggacgttgccaggtt

SEQ ID NO: 58748 - RNA, 16 nt, Synthetic Construct
  source 1..16: mol_type = other RNA
gcaagaggtcagcggt

SEQ ID NO: 58749 - RNA, 16 nt, Synthetic Construct
  source 1..16: mol_type = other RNA
gcaagaggtcagcggt

SEQ ID NO: 58750 - RNA, 20 nt, Synthetic Construct
  source 1..20: mol_type = other RNA
gtcagtttgtcaaatacccc

SEQ ID NO: 58751 - RNA, 20 nt, Synthetic Construct
  source 1..20: mol_type = other RNA
gtcagtttgtcaaatacccc

SEQ ID NO: 58752 - RNA, 22 nt, Synthetic Construct
  source 1..22: mol_type = other RNA
ctgggtcggtcgggctggggcg

SEQ ID NO: 58753 - RNA, 22 nt, Synthetic Construct
  source 1..22: mol_type = other RNA
ctgggtcggtcgggctggggcg

SEQ ID NO: 58754 - RNA, 19 nt, Synthetic Construct
  source 1..19: mol_type = other RNA
tccccggcatctccaccaa

SEQ ID NO: 58755 - RNA, 19 nt, Synthetic Construct
  source 1..19: mol_type = other RNA
tccccggcatctccaccaa

SEQ ID NO: 58756 - RNA, 19 nt, Synthetic Construct
  source 1..19: mol_type = other RNA
tggctcagttcagcaggaa

SEQ ID NO: 58757 - RNA, 19 nt, Synthetic Construct
  source 1..19: mol_type = other RNA
tggctcagttcagcaggaa

SEQ ID NO: 58758 - RNA, 28 nt, Synthetic Construct
  source 1..28: mol_type = other RNA
tgttggttcaagcgtgtagtcgtgctct

SEQ ID NO: 58759 - RNA, 28 nt, Synthetic Construct
  source 1..28: mol_type = other RNA
tgttggttcaagcgtgtagtcgtgctct

SEQ ID NO: 58760 - RNA, 21 nt, Synthetic Construct
  source 1..21: mol_type = other RNA
aagaaagattgcaagaactgc

SEQ ID NO: 58761 - RNA, 16 nt, Synthetic Construct
  source 1..16: mol_type = other RNA
gctattgacgaccgta

SEQ ID NO: 58762 - RNA, 20 nt, Synthetic Construct
  source 1..20: mol_type = other RNA
tgtcagtttgtcaaataccc

SEQ ID NO: 58763 - RNA, 20 nt, Synthetic Construct
  source 1..20: mol_type = other RNA
tgtcagtttgtcaaataccc

SEQ ID NO: 58764 - RNA, 25 nt, Synthetic Construct
  source 1..25: mol_type = other RNA
cgactcttagcggtggatcactcgg

SEQ ID NO: 58765 - RNA, 22 nt, Synthetic Construct
  source 1..22: mol_type = other RNA
tagcaacacgtaaatattggcg

SEQ ID NO: 58766 - RNA, 22 nt, Synthetic Construct
  source 1..22: mol_type = other RNA
tagcaacacgtaaatattggcg

SEQ ID NO: 58767 - RNA, 17 nt, Synthetic Construct
  source 1..17: mol_type = other RNA
cctcgcgcgattggagc

SEQ ID NO: 58768 - RNA, 17 nt, Synthetic Construct
  source 1..17: mol_type = other RNA
cctcgcgcgattggagc

SEQ ID NO: 58769 - RNA, 22 nt, Synthetic Construct
  source 1..22: mol_type = other RNA
tgaggtagtagtttgcgctgtt

SEQ ID NO: 58770 - RNA, 22 nt, Synthetic Construct
  source 1..22: mol_type = other RNA
tattgcactcgtcccggcctgt

SEQ ID NO: 58771 - RNA, 22 nt, Synthetic Construct
  source 1..22: mol_type = other RNA
agggggaaagttctatagtcct

SEQ ID NO: 58772 - RNA, 22 nt, Synthetic Construct
  source 1..22: mol_type = other RNA
agggggaaagttctatagtcct

SEQ ID NO: 58773 - RNA, 24 nt, Synthetic Construct
  source 1..24: mol_type = other RNA
cggagaaggttagctcagccaact

SEQ ID NO: 58774 - RNA, 22 nt, Synthetic Construct
  source 1..22: mol_type = other RNA
tcgtaccgtgagtaataacgcg

SEQ ID NO: 58775 - RNA, 22 nt, Synthetic Construct
  source 1..22: mol_type = other RNA
tgaggtagtaatttgtgctgtt

SEQ ID NO: 58776 - RNA, 22 nt, Synthetic Construct
  source 1..22: mol_type = other RNA
tgaggtagtaatttgtgctgtt

SEQ ID NO: 58777 - RNA, 21 nt, Synthetic Construct
  source 1..21: mol_type = other RNA
tggagagtgacaatggtgttt

SEQ ID NO: 58778 - RNA, 22 nt, Synthetic Construct
  source 1..22: mol_type = other RNA
ggcagcattgtacagggctatg

SEQ ID NO: 58779 - RNA, 22 nt, Synthetic Construct
  source 1..22: mol_type = other RNA
ggcagcattgtacagggctatg

SEQ ID NO: 58780 - RNA, 22 nt, Synthetic Construct
  source 1..22: mol_type = other RNA
tagcagcacataaatattggcg

SEQ ID NO: 58781 - RNA, 27 nt, Synthetic Construct
  source 1..27: mol_type = other RNA
ccccccactgttaaatttgactggctt

SEQ ID NO: 58782 - RNA, 15 nt, Synthetic Construct
  source 1..15: mol_type = other RNA
ttccgaaagtagtgg

SEQ ID NO: 58783 - RNA, 15 nt, Synthetic Construct
  source 1..15: mol_type = other RNA
ttccgaaagtagtgg

SEQ ID NO: 58784 - RNA, 23 nt, Synthetic Construct
  source 1..23: mol_type = other RNA
tattgcacttgtcccggcctgaa

SEQ ID NO: 58785 - RNA, 23 nt, Synthetic Construct
  source 1..23: mol_type = other RNA
tattgcacttgtcccggcctgaa

SEQ ID NO: 58786 - RNA, 21 nt, Synthetic Construct
  source 1..21: mol_type = other RNA
gcagtagtctgcacattggtt

SEQ ID NO: 58787 - RNA, 21 nt, Synthetic Construct
  source 1..21: mol_type = other RNA
gcagtagtctgcacattggtt

SEQ ID NO: 58788 - RNA, 19 nt, Synthetic Construct
  source 1..19: mol_type = other RNA
tcctgtaccgatcaatagt

SEQ ID NO: 58789 - RNA, 22 nt, Synthetic Construct
  source 1..22: mol_type = other RNA
tgagaactgaattccatgggtt

SEQ ID NO: 58790 - RNA, 22 nt, Synthetic Construct
  source 1..22: mol_type = other RNA
tgagaactgaattccatgggtt

SEQ ID NO: 58791 - RNA, 27 nt, Synthetic Construct
  source 1..27: mol_type = other RNA
acccccactgctaaatttgactggctt

SEQ ID NO: 58792 - RNA, 22 nt, Synthetic Construct
  source 1..22: mol_type = other RNA
tgaggtagtagatcgtatagtt

SEQ ID NO: 58793 - RNA, 22 nt, Synthetic Construct
  source 1..22: mol_type = other RNA
tgaggtagtagatcgtatagtt

SEQ ID NO: 58794 - RNA, 21 nt, Synthetic Construct
  source 1..21: mol_type = other RNA
tgaggggcagagagcgagaca

SEQ ID NO: 58795 - RNA, 21 nt, Synthetic Construct
  source 1..21: mol_type = other RNA
tgaggggcagagagcgagaca

SEQ ID NO: 58796 - RNA, 21 nt, Synthetic Construct
  source 1..21: mol_type = other RNA
cgtgccgtgagtaataatgcg

SEQ ID NO: 58797 - RNA, 22 nt, Synthetic Construct
  source 1..22: mol_type = other RNA
tcgcagcacgtaaatattggcg

SEQ ID NO: 58798 - RNA, 22 nt, Synthetic Construct
  source 1..22: mol_type = other RNA
tcgcagcacgtaaatattggcg

SEQ ID NO: 58799 - RNA, 29 nt, Synthetic Construct
  source 1..29: mol_type = other RNA
gtgcatgcactctggggttgtgggacagc

SEQ ID NO: 58800 - RNA, 29 nt, Synthetic Construct
  source 1..29: mol_type = other RNA
gtgcatgcactctggggttgtgggacagc

SEQ ID NO: 58801 - RNA, 20 nt, Synthetic Construct
  source 1..20: mol_type = other RNA
cataaagtagaaagcactac

SEQ ID NO: 58802 - RNA, 31 nt, Synthetic Construct; identical to SEQ ID NO: 2427
  source 1..31: mol_type = other RNA

SEQ ID NO: 58803 - RNA, 20 nt, Synthetic Construct
  source 1..20: mol_type = other RNA
taccacagggtagaaccacg

SEQ ID NO: 58804 - RNA, 20 nt, Synthetic Construct
  source 1..20: mol_type = other RNA
taccacagggtagaaccacg

SEQ ID NO: 58805 - RNA, 22 nt, Synthetic Construct
  source 1..22: mol_type = other RNA
ttcaagtaattcaggataggtc

SEQ ID NO: 58806 - RNA, 31 nt, Synthetic Construct; identical to SEQ ID NO: 2147
  source 1..31: mol_type = other RNA

SEQ ID NO: 58807 - RNA, 31 nt, Synthetic Construct; identical to SEQ ID NO: 2147
  source 1..31: mol_type = other RNA

SEQ ID NO: 58808 - RNA, 23 nt, Synthetic Construct
  source 1..23: mol_type = other RNA
tgaggcagtaggttgtgtggttt

SEQ ID NO: 58809 - RNA, 23 nt, Synthetic Construct
  source 1..23: mol_type = other RNA
tgaggcagtaggttgtgtggttt

SEQ ID NO: 58810 - RNA, 21 nt, Synthetic Construct
  source 1..21: mol_type = other RNA
ttataatacaacctgataagt

SEQ ID NO: 58811 - RNA, 25 nt, Synthetic Construct
  source 1..25: mol_type = other RNA
ttgaggatatgagatcgggacgaca

SEQ ID NO: 58812 - RNA, 25 nt, Synthetic Construct
  source 1..25: mol_type = other RNA
ttgaggatatgagatcgggacgaca

SEQ ID NO: 58813 - RNA, 22 nt, Synthetic Construct
  source 1..22: mol_type = other RNA
tcctgtactgagctgccccgtg

SEQ ID NO: 58814 - RNA, 22 nt, Synthetic Construct
  source 1..22: mol_type = other RNA
tcctgtactgagctgccccgtg

SEQ ID NO: 58815 - RNA, 23 nt, Synthetic Construct
  source 1..23: mol_type = other RNA
tagtaatacgacgtacttagtgt

SEQ ID NO: 58816 - RNA, 23 nt, Synthetic Construct
  source 1..23: mol_type = other RNA
tagtaatacgacgtacttagtgt

SEQ ID NO: 58817 - RNA, 23 nt, Synthetic Construct
  source 1..23: mol_type = other RNA
caaagtgctgttcgcgcaggtag

SEQ ID NO: 58818 - RNA, 23 nt, Synthetic Construct
  source 1..23: mol_type = other RNA
caaagtgctgttcgcgcaggtag

SEQ ID NO: 58819 - RNA, 22 nt, Synthetic Construct
  source 1..22: mol_type = other RNA
gaagaggacttggaactcgatc

SEQ ID NO: 58820 - RNA, 22 nt, Synthetic Construct
  source 1..22: mol_type = other RNA
gaagaggacttggaactcgatc

SEQ ID NO: 58821 - RNA, 22 nt, Synthetic Construct
  source 1..22: mol_type = other RNA
tcctgtactgagctgccccggg

SEQ ID NO: 58822 - RNA, 22 nt, Synthetic Construct
  source 1..22: mol_type = other RNA
tcctgaactgagctgccccgag

SEQ ID NO: 58823 - RNA, 22 nt, Synthetic Construct
  source 1..22: mol_type = other RNA
tgaggtagtaggttatatagtt

SEQ ID NO: 58824 - RNA, 24 nt, Synthetic Construct
  source 1..24: mol_type = other RNA
tgtaaacatccccggctggaagct

SEQ ID NO: 58825 - RNA, 24 nt, Synthetic Construct
  source 1..24: mol_type = other RNA
tgtaaacatccccggctggaagct

SEQ ID NO: 58826 - RNA, 21 nt, Synthetic Construct
  source 1..21: mol_type = other RNA
tcctatactgagctgccccga

SEQ ID NO: 58827 - RNA, 20 nt, Synthetic Construct
  source 1..20: mol_type = other RNA
ctcgtagttggatcttggga

SEQ ID NO: 58828 - RNA, 23 nt, Synthetic Construct
  source 1..23: mol_type = other RNA
ttcaagtaattcaggataggtta

SEQ ID NO: 58829 - RNA, 22 nt, Synthetic Construct
  source 1..22: mol_type = other RNA
tattgcacttgtcccggcccgt

SEQ ID NO: 58830 - RNA, 21 nt, Synthetic Construct
  source 1..21: mol_type = other RNA
taactcttaagcgaatctcgc

SEQ ID NO: 58831 - RNA, 21 nt, Synthetic Construct
  source 1..21: mol_type = other RNA
taactcttaagcgaatctcgc

SEQ ID NO: 58832 - RNA, 30 nt, Synthetic Construct; identical to SEQ ID NO: 6467
  source 1..30: mol_type = other RNA

SEQ ID NO: 58833 - RNA, 30 nt, Synthetic Construct; identical to SEQ ID NO: 6467
  source 1..30: mol_type = other RNA

SEQ ID NO: 58834 - RNA, 24 nt, Synthetic Construct
  source 1..24: mol_type = other RNA
tgcaaacatccccgactggaagct

SEQ ID NO: 58835 - RNA, 32 nt, Synthetic Construct; identical to SEQ ID NO: 2318
  source 1..32: mol_type = other RNA

SEQ ID NO: 58836 - RNA, 21 nt, Synthetic Construct
  source 1..21: mol_type = other RNA
cgaggtagtaggttgtatagt

SEQ ID NO: 58837 - RNA, 21 nt, Synthetic Construct
  source 1..21: mol_type = other RNA
cgaggtagtaggttgtatagt

SEQ ID NO: 58838 - RNA, 35 nt, Synthetic Construct; identical to SEQ ID NO: 19298
  source 1..35: mol_type = other RNA

SEQ ID NO: 58839 - RNA, 35 nt, Synthetic Construct; identical to SEQ ID NO: 19298
  source 1..35: mol_type = other RNA

SEQ ID NO: 58840 - RNA, 33 nt, Synthetic Construct; identical to SEQ ID NO: 4947
  source 1..33: mol_type = other RNA

SEQ ID NO: 58841 - RNA, 33 nt, Synthetic Construct; identical to SEQ ID NO: 4947
  source 1..33: mol_type = other RNA

SEQ ID NO: 58842 - RNA, 22 nt, Synthetic Construct
  source 1..22: mol_type = other RNA
tcgcaccgtgagtaataatgcg

SEQ ID NO: 58843 - RNA, 16 nt, Synthetic Construct
  source 1..16: mol_type = other RNA
ggcgggggtcgctggt

SEQ ID NO: 58844 - RNA, 21 nt, Synthetic Construct
  source 1..21: mol_type = other RNA
ctagaccgaagctccttgagg

SEQ ID NO: 58845 - RNA, 21 nt, Synthetic Construct
  source 1..21: mol_type = other RNA
ctagaccgaagctccttgagg

SEQ ID NO: 58846 - RNA, 23 nt, Synthetic Construct
  source 1..23: mol_type = other RNA
tcactgatcgagtcgtcctgcgc

SEQ ID NO: 58847 - RNA, 22 nt, Synthetic Construct
  source 1..22: mol_type = other RNA
tcctgtactgagctgctccgag

SEQ ID NO: 58848 - RNA, 27 nt, Synthetic Construct
  source 1..27: mol_type = other RNA
ccccccactgctaagtttgactggctt

SEQ ID NO: 58849 - RNA, 27 nt, Synthetic Construct
  source 1..27: mol_type = other RNA
ccccccactgctaagtttgactggctt

SEQ ID NO: 58850 - RNA, 21 nt, Synthetic Construct
  source 1..21: mol_type = other RNA
tcctgtactgagctgccccaa

SEQ ID NO: 58851 - RNA, 23 nt, Synthetic Construct
  source 1..23: mol_type = other RNA
caaagtgttgttcgtgcaggtag

SEQ ID NO: 58852 - RNA, 29 nt, Synthetic Construct
  source 1..29: mol_type = other RNA
gatgcgaaagcaggtcaaagtgatccggc

SEQ ID NO: 58853 - RNA, 29 nt, Synthetic Construct
  source 1..29: mol_type = other RNA
gatgcgaaagcaggtcaaagtgatccggc

SEQ ID NO: 58854 - RNA, 27 nt, Synthetic Construct
  source 1..27: mol_type = other RNA
tcctgagtagctcagcggcagagcggg

SEQ ID NO: 58855 - RNA, 27 nt, Synthetic Construct
  source 1..27: mol_type = other RNA
tcctgagtagctcagcggcagagcggg

SEQ ID NO: 58856 - RNA, 27 nt, Synthetic Construct
  source 1..27: mol_type = other RNA
tcccccactgctaaatttgactggctt

SEQ ID NO: 58857 - RNA, 22 nt, Synthetic Construct
  source 1..22: mol_type = other RNA
tgtcagtttgccaaatacccca

SEQ ID NO: 58858 - RNA, 26 nt, Synthetic Construct
  source 1..26: mol_type = other RNA
tgtcggctcatctcatcctggggctg

SEQ ID NO: 58859 - RNA, 26 nt, Synthetic Construct
  source 1..26: mol_type = other RNA
tgtcggctcatctcatcctggggctg

SEQ ID NO: 58860 - RNA, 22 nt, Synthetic Construct
  source 1..22: mol_type = other RNA
agaggtagtaggttgtgtggtt

SEQ ID NO: 58861 - RNA, 21 nt, Synthetic Construct
  source 1..21: mol_type = other RNA
ttaatgctaatcgtgataggg

SEQ ID NO: 58862 - RNA, 21 nt, Synthetic Construct
  source 1..21: mol_type = other RNA
ttaatgctaatcgtgataggg

SEQ ID NO: 58863 - RNA, 21 nt, Synthetic Construct
  source 1..21: mol_type = other RNA
tgaggtagcagattgtatagt

SEQ ID NO: 58864 - RNA, 20 nt, Synthetic Construct
  source 1..20: mol_type = other RNA
tgaggtagtaggttgtgagg

SEQ ID NO: 58865 - RNA, 25 nt, Synthetic Construct
  source 1..25: mol_type = other RNA
aaaccgttaccattactgagtttag

SEQ ID NO: 58866 - RNA, 22 nt, Synthetic Construct
  source 1..22: mol_type = other RNA
tgaggtagtggtttgtgctgtt

SEQ ID NO: 58867 - RNA, 19 nt, Synthetic Construct
  source 1..19: mol_type = other RNA
ccgtgttcggaagattttc

SEQ ID NO: 58868 - RNA, 22 nt, Synthetic Construct
  source 1..22: mol_type = other RNA
tgaggtagtaggttgcatagtt

SEQ ID NO: 58869 - RNA, 22 nt, Synthetic Construct
  source 1..22: mol_type = other RNA
tcctgtactgagccgccccgag

SEQ ID NO: 58870 - RNA, 22 nt, Synthetic Construct
  source 1..22: mol_type = other RNA
tcctgtactgagccgccccgag

SEQ ID NO: 58871 - RNA, 22 nt, Synthetic Construct
  source 1..22: mol_type = other RNA
tgaggtagtagtttgcgctgtt

SEQ ID NO: 58872 - RNA, 22 nt, Synthetic Construct
  source 1..22: mol_type = other RNA
tgaggtagtagtttgcgctgtt

SEQ ID NO: 58873 - RNA, 22 nt, Synthetic Construct
  source 1..22: mol_type = other RNA
tgaggtagaagtttgtgctgtt

SEQ ID NO: 58874 - RNA, 22 nt, Synthetic Construct
  source 1..22: mol_type = other RNA
tgaggtagtaggttatatagtt

SEQ ID NO: 58875 - RNA, 20 nt, Synthetic Construct
  source 1..20: mol_type = other RNA
gcgtgcttgactgcgagact

SEQ ID NO: 58876 - RNA, 20 nt, Synthetic Construct
  source 1..20: mol_type = other RNA
gcgtgcttgactgcgagact

SEQ ID NO: 58877 - RNA, 22 nt, Synthetic Construct
  source 1..22: mol_type = other RNA
caaagtgctgttcgtgcaggta

SEQ ID NO: 58878 - RNA, 24 nt, Synthetic Construct
  source 1..24: mol_type = other RNA
tgtaaacgtccccgactggaagct

SEQ ID NO: 58879 - RNA, 22 nt, Synthetic Construct
  source 1..22: mol_type = other RNA
agcaggacggtggccatggaag

SEQ ID NO: 58880 - RNA, 22 nt, Synthetic Construct
  source 1..22: mol_type = other RNA
agcaggacggtggccatggaag

SEQ ID NO: 58881 - RNA, 15 nt, Synthetic Construct
  source 1..15: mol_type = other RNA
gtacgtgagctgggt

SEQ ID NO: 58882 - RNA, 15 nt, Synthetic Construct
  source 1..15: mol_type = other RNA
gtacgtgagctgggt

SEQ ID NO: 58883 - RNA, 23 nt, Synthetic Construct
  source 1..23: mol_type = other RNA
tgaggtagtaggttgtgtggtat

SEQ ID NO: 58884 - RNA, 23 nt, Synthetic Construct
  source 1..23: mol_type = other RNA
agctacattgtctgctgggttcc

SEQ ID NO: 58885 - RNA, 23 nt, Synthetic Construct
  source 1..23: mol_type = other RNA
agctacattgtctgctgggttcc

SEQ ID NO: 58886 - RNA, 24 nt, Synthetic Construct
  source 1..24: mol_type = other RNA
aatgacacgatcactcccgttgag

SEQ ID NO: 58887 - RNA, 24 nt, Synthetic Construct
  source 1..24: mol_type = other RNA
aatgacacgatcactcccgttgag

SEQ ID NO: 58888 - RNA, 24 nt, Synthetic Construct
  source 1..24: mol_type = other RNA
gttcgattccggagagggagcctg

SEQ ID NO: 58889 - RNA, 24 nt, Synthetic Construct
  source 1..24: mol_type = other RNA
gttcgattccggagagggagcctg

SEQ ID NO: 58890 - RNA, 22 nt, Synthetic Construct
  source 1..22: mol_type = other RNA
tgtgactggttgaccagagggg

SEQ ID NO: 58891 - RNA, 22 nt, Synthetic Construct
  source 1..22: mol_type = other RNA
tgtgactggttgaccagagggg

SEQ ID NO: 58892 - RNA, 22 nt, Synthetic Construct
  source 1..22: mol_type = other RNA
cataaagtagaaagcactacta

SEQ ID NO: 58893 - RNA, 21 nt, Synthetic Construct
  source 1..21: mol_type = other RNA
tgaggtagtaggttgtgtgat

SEQ ID NO: 58894 - RNA, 28 nt, Synthetic Construct
  source 1..28: mol_type = other RNA
cccccccactgctaaatttgactggctt

SEQ ID NO: 58895 - RNA, 28 nt, Synthetic Construct
  source 1..28: mol_type = other RNA
cccccccactgctaaatttgactggctt

SEQ ID NO: 58896 - RNA, 21 nt, Synthetic Construct
  source 1..21: mol_type = other RNA
ctagactgaggctccttgagg

SEQ ID NO: 58897 - RNA, 22 nt, Synthetic Construct
  source 1..22: mol_type = other RNA
taaatccttaagcgaatctcgc

SEQ ID NO: 58898 - RNA, 22 nt, Synthetic Construct
  source 1..22: mol_type = other RNA
taaatccttaagcgaatctcgc

SEQ ID NO: 58899 - RNA, 22 nt, Synthetic Construct
  source 1..22: mol_type = other RNA
tgaggtagaaggttgtatagtt

SEQ ID NO: 58900 - RNA, 17 nt, Synthetic Construct
  source 1..17: mol_type = other RNA
ccagtaaacggcggccg

SEQ ID NO: 58901 - RNA, 21 nt, Synthetic Construct
  source 1..21: mol_type = other RNA
atgtcccacccccactcctgt

SEQ ID NO: 58902 - RNA, 21 nt, Synthetic Construct
  source 1..21: mol_type = other RNA
atgtcccacccccactcctgt

SEQ ID NO: 58903 - RNA, 22 nt, Synthetic Construct
  source 1..22: mol_type = other RNA
tattgcacctgtcccggcctgt

SEQ ID NO: 58904 - RNA, 27 nt, Synthetic Construct
  source 1..27: mol_type = other RNA
tcggctgttaaccgaaaggttggtggt

SEQ ID NO: 58905 - RNA, 27 nt, Synthetic Construct
  source 1..27: mol_type = other RNA
ncccccactgctaaatttgactggctt

SEQ ID NO: 58906 - RNA, 22 nt, Synthetic Construct
  source 1..22: mol_type = other RNA
tagcagcacataaatattggcg

SEQ ID NO: 58907 - RNA, 22 nt, Synthetic Construct
  source 1..22: mol_type = other RNA
tagcagcacataaatattggcg

SEQ ID NO: 58908 - RNA, 22 nt, Synthetic Construct
  source 1..22: mol_type = other RNA
tgaggtagtaggttgcatagtt

SEQ ID NO: 58909 - RNA, 22 nt, Synthetic Construct
  source 1..22: mol_type = other RNA
tagcagcacgtaaatattggtg

SEQ ID NO: 58910 - RNA, 22 nt, Synthetic Construct
  source 1..22: mol_type = other RNA
tcaaatcccggacgagccccca

SEQ ID NO: 58911 - RNA, 22 nt, Synthetic Construct
  source 1..22: mol_type = other RNA
tcaaatcccggacgagccccca

SEQ ID NO: 58912 - RNA, 32 nt, Synthetic Construct; identical to SEQ ID NO: 1237
  source 1..32: mol_type = other RNA

SEQ ID NO: 58913 - RNA, 32 nt, Synthetic Construct; identical to SEQ ID NO: 1237
  source 1..32: mol_type = other RNA

SEQ ID NO: 58914 - RNA, 15 nt, Synthetic Construct
  source 1..15: mol_type = other RNA
ttccgaaagtagtgg

SEQ ID NO: 58915 - RNA, 23 nt, Synthetic Construct
  source 1..23: mol_type = other RNA
tcctgtactgagctgccccgggt

SEQ ID NO: 58916 - RNA, 24 nt, Synthetic Construct
  source 1..24: mol_type = other RNA
tgaaaacatccccgactggaagct

SEQ ID NO: 58917 - RNA, 24 nt, Synthetic Construct
  source 1..24: mol_type = other RNA
tgaaaacatccccgactggaagct

SEQ ID NO: 58918 - RNA, 23 nt, Synthetic Construct
  source 1..23: mol_type = other RNA
agcaacattgtctgctgggtttc

SEQ ID NO: 58919 - RNA, 23 nt, Synthetic Construct
  source 1..23: mol_type = other RNA
agcaacattgtctgctgggtttc

SEQ ID NO: 58920 - RNA, 21 nt, Synthetic Construct
  source 1..21: mol_type = other RNA
ggaggagttcgaaggtacgct

SEQ ID NO: 58921 - RNA, 23 nt, Synthetic Construct
  source 1..23: mol_type = other RNA
tgaggtagtgggttgtgtggttt

SEQ ID NO: 58922 - RNA, 17 nt, Synthetic Construct
  source 1..17: mol_type = other RNA
ggctggtccgaaggtag

SEQ ID NO: 58923 - RNA, 23 nt, Synthetic Construct
  source 1..23: mol_type = other RNA
tggtaatacgacgtactttgtgt

SEQ ID NO: 58924 - RNA, 23 nt, Synthetic Construct
  source 1..23: mol_type = other RNA
tcttggagtaggtcattgggtgg

SEQ ID NO: 58925 - RNA, 22 nt, Synthetic Construct
  source 1..22: mol_type = other RNA
tgaggttgtagtttgtgctgtt

SEQ ID NO: 58926 - RNA, 18 nt, Synthetic Construct
  source 1..18: mol_type = other RNA
ggtagcgtggccgagtgg

SEQ ID NO: 58927 - RNA, 21 nt, Synthetic Construct
  source 1..21: mol_type = other RNA
tgaggtagtagactgtatagt

SEQ ID NO: 58928 - RNA, 21 nt, Synthetic Construct
  source 1..21: mol_type = other RNA
tgaggtagtagactgtatagt

SEQ ID NO: 58929 - RNA, 22 nt, Synthetic Construct
  source 1..22: mol_type = other RNA
tgagaactgaatcccatgggtt

SEQ ID NO: 58930 - RNA, 21 nt, Synthetic Construct
  source 1..21: mol_type = other RNA
tcctgtactgagctgcccgag

SEQ ID NO: 58931 - RNA, 28 nt, Synthetic Construct
  source 1..28: mol_type = other RNA
ggatttccccttggggttgtaggaccac

SEQ ID NO: 58932 - RNA, 28 nt, Synthetic Construct
  source 1..28: mol_type = other RNA
ggatttccccttggggttgtaggaccac

SEQ ID NO: 58933 - RNA, 39 nt, Synthetic Construct; identical to SEQ ID NO: 759
  source 1..39: mol_type = other RNA

SEQ ID NO: 58934 - RNA, 39 nt, Synthetic Construct; identical to SEQ ID NO: 759
  source 1..39: mol_type = other RNA

SEQ ID NO: 58935 - RNA, 23 nt, Synthetic Construct
  source 1..23: mol_type = other RNA
tcctgtactgagctgccctgagt

SEQ ID NO: 58936 - RNA, 22 nt, Synthetic Construct
  source 1..22: mol_type = other RNA
ngaggtagtaggttgtatagtt

SEQ ID NO: 58937 - RNA, 16 nt, Synthetic Construct
  source 1..16: mol_type = other RNA
ccggaggaaggtgggg

SEQ ID NO: 58938 - RNA, 24 nt, Synthetic Construct
  source 1..24: mol_type = other RNA
gactatagaactttccccctcatt

SEQ ID NO: 58939 - RNA, 39 nt, Synthetic Construct; identical to SEQ ID NO: 759
  source 1..39: mol_type = other RNA

SEQ ID NO: 58940 - RNA, 39 nt, Synthetic Construct; identical to SEQ ID NO: 759
  source 1..39: mol_type = other RNA

SEQ ID NO: 58941 - RNA, 22 nt, Synthetic Construct
  source 1..22: mol_type = other RNA
tgtcagtttgtcaaatacccca

SEQ ID NO: 58942 - RNA, 22 nt, Synthetic Construct
  source 1..22: mol_type = other RNA
tgtcagtttgtcaaatacccca

SEQ ID NO: 58943 - RNA, 22 nt, Synthetic Construct
  source 1..22: mol_type = other RNA
tgaggtagtaggttgagtggtt

SEQ ID NO: 58944 - RNA, 30 nt, Synthetic Construct; identical to SEQ ID NO: 10539
  source 1..30: mol_type = other RNA

SEQ ID NO: 58945 - RNA, 30 nt, Synthetic Construct; identical to SEQ ID NO: 10539
  source 1..30: mol_type = other RNA

SEQ ID NO: 58946 - RNA, 22 nt, Synthetic Construct
  source 1..22: mol_type = other RNA
tgaggtagtaggttgtatagat

SEQ ID NO: 58947 - RNA, 22 nt, Synthetic Construct
  source 1..22: mol_type = other RNA
aacggaatcccaaaagcagctg

SEQ ID NO: 58948 - RNA, 22 nt, Synthetic Construct
  source 1..22: mol_type = other RNA
aacggaatcccaaaagcagctg

SEQ ID NO: 58949 - RNA, 22 nt, Synthetic Construct
  source 1..22: mol_type = other RNA
tattgcacttgtcccgacctgt

SEQ ID NO: 58950 - RNA, 22 nt, Synthetic Construct
  source 1..22: mol_type = other RNA
tattgcacttgtcccgacctgt

SEQ ID NO: 58951 - RNA, 37 nt, Synthetic Construct; identical to SEQ ID NO: 5125
  source 1..37: mol_type = other RNA

SEQ ID NO: 58952 - RNA, 37 nt, Synthetic Construct; identical to SEQ ID NO: 5125
  source 1..37: mol_type = other RNA

SEQ ID NO: 58953 - RNA, 17 nt, Synthetic Construct
  source 1..17: mol_type = other RNA
catgcaagtcgaacggt

SEQ ID NO: 58954 - RNA, 17 nt, Synthetic Construct
  source 1..17: mol_type = other RNA
catgcaagtcgaacggt

SEQ ID NO: 58955 - RNA, 22 nt, Synthetic Construct
  source 1..22: mol_type = other RNA
cattgcactagtctcggtctga

SEQ ID NO: 58956 - RNA, 26 nt, Synthetic Construct
  source 1..26: mol_type = other RNA
tccctggtggtctagtggttaggatt

SEQ ID NO: 58957 - RNA, 19 nt, Synthetic Construct
  source 1..19: mol_type = other RNA
agctacattgtctgctggg

SEQ ID NO: 58958 - RNA, 19 nt, Synthetic Construct
  source 1..19: mol_type = other RNA
agctacattgtctgctggg

SEQ ID NO: 58959 - RNA, 22 nt, Synthetic Construct
  source 1..22: mol_type = other RNA
tgaggtaatagattgtatagtt

SEQ ID NO: 58960 - RNA, 22 nt, Synthetic Construct
  source 1..22: mol_type = other RNA
tgaggtaatagattgtatagtt

SEQ ID NO: 58961 - RNA, 22 nt, Synthetic Construct
  source 1..22: mol_type = other RNA
tgaggtagtagtttgtgcagtt

SEQ ID NO: 58962 - RNA, 15 nt, Synthetic Construct
  source 1..15: mol_type = other RNA
ccagaaacccggtcg

SEQ ID NO: 58963 - RNA, 15 nt, Synthetic Construct
  source 1..15: mol_type = other RNA
ccagaaacccggtcg

SEQ ID NO: 58964 - RNA, 22 nt, Synthetic Construct
  source 1..22: mol_type = other RNA
ttcacagtggctaagttctgca

SEQ ID NO: 58965 - RNA, 16 nt, Synthetic Construct
  source 1..16: mol_type = other RNA
gtctacggacatacca

SEQ ID NO: 58966 - RNA, 16 nt, Synthetic Construct
  source 1..16: mol_type = other RNA
gtctacggacatacca

SEQ ID NO: 58967 - RNA, 22 nt, Synthetic Construct
  source 1..22: mol_type = other RNA
tagcagcacgtaaatattagcg

SEQ ID NO: 58968 - RNA, 22 nt, Synthetic Construct
  source 1..22: mol_type = other RNA
tagcagcacgtaaatattagcg

SEQ ID NO: 58969 - RNA, 22 nt, Synthetic Construct
  source 1..22: mol_type = other RNA
tagcagcacgtagatattggcg

SEQ ID NO: 58970 - RNA, 22 nt, Synthetic Construct
  source 1..22: mol_type = other RNA
tagcagcacgtagatattggcg

SEQ ID NO: 58971 - RNA, 22 nt, Synthetic Construct
  source 1..22: mol_type = other RNA
tgatgtagtaggttgtatagtt

SEQ ID NO: 58972 - RNA, 22 nt, Synthetic Construct
  source 1..22: mol_type = other RNA
tgatgtagtaggttgtatagtt

SEQ ID NO: 58973 - RNA, 23 nt, Synthetic Construct
  source 1..23: mol_type = other RNA
tgaggggcagagagcgagacttg

SEQ ID NO: 58974 - RNA, 21 nt, Synthetic Construct
  source 1..21: mol_type = other RNA
tccagtactgagctgccccga

SEQ ID NO: 58975 - RNA, 21 nt, Synthetic Construct
  source 1..21: mol_type = other RNA
tccagtactgagctgccccga

SEQ ID NO: 58976 - RNA, 22 nt, Synthetic Construct
  source 1..22: mol_type = other RNA
tgaggtagtaagttgtgtggtt

SEQ ID NO: 58977 - RNA, 43 nt, Synthetic Construct; identical to SEQ ID NO: 1204
  source 1..43: mol_type = other RNA

SEQ ID NO: 58978 - RNA, 43 nt, Synthetic Construct; identical to SEQ ID NO: 1204
  source 1..43: mol_type = other RNA

SEQ ID NO: 58979 - RNA, 24 nt, Synthetic Construct
  source 1..24: mol_type = other RNA
tgaggtagtaggttgtgtggttaa

SEQ ID NO: 58980 - RNA, 24 nt, Synthetic Construct
  source 1..24: mol_type = other RNA
tgaggtagtaggttgtgtggttaa

SEQ ID NO: 58981 - RNA, 22 nt, Synthetic Construct
  source 1..22: mol_type = other RNA
tattgcacttgccccggcctgt

SEQ ID NO: 58982 - RNA, 22 nt, Synthetic Construct
  source 1..22: mol_type = other RNA
ttcaagtaattaaggataggtt

SEQ ID NO: 58983 - RNA, 22 nt, Synthetic Construct
  source 1..22: mol_type = other RNA
tgaggtagtagtttgtgctgat

SEQ ID NO: 58984 - RNA, 22 nt, Synthetic Construct
  source 1..22: mol_type = other RNA
tattgcacttgtcccgacctgt

SEQ ID NO: 58985 - RNA, 22 nt, Synthetic Construct
  source 1..22: mol_type = other RNA
tattgcacttgtcccgacctgt

SEQ ID NO: 58986 - RNA, 21 nt, Synthetic Construct
  source 1..21: mol_type = other RNA
tgaggtagtgggttgtatagt

SEQ ID NO: 58987 - RNA, 21 nt, Synthetic Construct
  source 1..21: mol_type = other RNA
tgaggtagtgggttgtatagt

SEQ ID NO: 58988 - RNA, 22 nt, Synthetic Construct
  source 1..22: mol_type = other RNA
aatcgtacagggtcatccactt

SEQ ID NO: 58989 - RNA, 22 nt, Synthetic Construct
  source 1..22: mol_type = other RNA
aatcgtacagggtcatccactt

SEQ ID NO: 58990 - RNA, 15 nt, Synthetic Construct
  source 1..15: mol_type = other RNA
catgccgcgtgcggg

SEQ ID NO: 58991 - RNA, 22 nt, Synthetic Construct
  source 1..22: mol_type = other RNA
cttaacttgaccgctctgacca

SEQ ID NO: 58992 - RNA, 23 nt, Synthetic Construct
  source 1..23: mol_type = other RNA
tgaggtagtaggttgtgtggtaa

SEQ ID NO: 58993 - RNA, 23 nt, Synthetic Construct
  source 1..23: mol_type = other RNA
tgaggtagtaggttgtgtggtaa

SEQ ID NO: 58994 - RNA, 23 nt, Synthetic Construct
  source 1..23: mol_type = other RNA
tgtgcaaatctatgcaaaactga

SEQ ID NO: 58995 - RNA, 21 nt, Synthetic Construct
  source 1..21: mol_type = other RNA
gagttctacagtccgacgatc

SEQ ID NO: 58996 - RNA, 21 nt, Synthetic Construct
  source 1..21: mol_type = other RNA
gagttctacagtccgacgatc

SEQ ID NO: 58997 - RNA, 23 nt, Synthetic Construct
  source 1..23: mol_type = other RNA
tcctgtaccgagctgccccgaga

SEQ ID NO: 58998 - RNA, 21 nt, Synthetic Construct
  source 1..21: mol_type = other RNA
tgaggtagcagattgtatagt

SEQ ID NO: 58999 - RNA, 23 nt, Synthetic Construct
  source 1..23: mol_type = other RNA
caaagcgctgttcgtgcaggtag

SEQ ID NO: 59000 - RNA, 23 nt, Synthetic Construct
  source 1..23: mol_type = other RNA
caaagtgcttacagtgcaggtag

SEQ ID NO: 59001 - RNA, 21 nt, Synthetic Construct
  source 1..21: mol_type = other RNA
tgaggtagaaggttgtatagt

SEQ ID NO: 59002 - RNA, 21 nt, Synthetic Construct
  source 1..21: mol_type = other RNA
tgaggtagaaggttgtatagt

SEQ ID NO: 59003 - RNA, 22 nt, Synthetic Construct
  source 1..22: mol_type = other RNA
tatcgcacttgtcccggcctgt

SEQ ID NO: 59004 - RNA, 36 nt, Synthetic Construct; identical to SEQ ID NO: 3596
  source 1..36: mol_type = other RNA

SEQ ID NO: 59005 - RNA, 36 nt, Synthetic Construct; identical to SEQ ID NO: 3596
  source 1..36: mol_type = other RNA

SEQ ID NO: 59006 - RNA, 22 nt, Synthetic Construct
  source 1..22: mol_type = other RNA
tatatatatatatgtacgtatg

SEQ ID NO: 59007 - RNA, 22 nt, Synthetic Construct
  source 1..22: mol_type = other RNA
cattgcacttgtctcagtctga

SEQ ID NO: 59008 - RNA, 22 nt, Synthetic Construct
  source 1..22: mol_type = other RNA
cattgcacttgtctcagtctga

SEQ ID NO: 59009 - RNA, 22 nt, Synthetic Construct
  source 1..22: mol_type = other RNA
tccagcatcagtgattttgttg

SEQ ID NO: 59010 - RNA, 23 nt, Synthetic Construct
  source 1..23: mol_type = other RNA
tcccacatggtctagcggttagg

SEQ ID NO: 59011 - RNA, 23 nt, Synthetic Construct
  source 1..23: mol_type = other RNA
tcccacatggtctagcggttagg

SEQ ID NO: 59012 - RNA, 16 nt, Synthetic Construct
  source 1..16: mol_type = other RNA
gaaattccttgtcggg

SEQ ID NO: 59013 - RNA, 16 nt, Synthetic Construct
  source 1..16: mol_type = other RNA
gaaattccttgtcggg

SEQ ID NO: 59014 - RNA, 22 nt, Synthetic Construct
  source 1..22: mol_type = other RNA
tgaggtagtaggttgtatagta

SEQ ID NO: 59015 - RNA, 22 nt, Synthetic Construct
  source 1..22: mol_type = other RNA
tgaggtagtaggttgtatagta

SEQ ID NO: 59016 - RNA, 23 nt, Synthetic Construct
  source 1..23: mol_type = other RNA
ggaggggcagagagcgagacttt

SEQ ID NO: 59017 - RNA, 26 nt, Synthetic Construct
  source 1..26: mol_type = other RNA
ggtggctgtagctcagttggtagagt

SEQ ID NO: 59018 - RNA, 26 nt, Synthetic Construct
  source 1..26: mol_type = other RNA
ggtggctgtagctcagttggtagagt

SEQ ID NO: 59019 - RNA, 20 nt, Synthetic Construct
  source 1..20: mol_type = other RNA
tgaggcagtaggttgtgtgg

SEQ ID NO: 59020 - RNA, 22 nt, Synthetic Construct
  source 1..22: mol_type = other RNA
tagcagcacgtaaatattggtg

SEQ ID NO: 59021 - RNA, 22 nt, Synthetic Construct
  source 1..22: mol_type = other RNA
tattgcacttgtcccagcctgt

SEQ ID NO: 59022 - RNA, 27 nt, Synthetic Construct
  source 1..27: mol_type = other RNA
ttctcactactgcacttgactagtctt

SEQ ID NO: 59023 - RNA, 27 nt, Synthetic Construct
  source 1..27: mol_type = other RNA
ttctcactactgcacttgactagtctt

SEQ ID NO: 59024 - RNA, 21 nt, Synthetic Construct
  source 1..21: mol_type = other RNA
tgaggtggtaggttgtatagt

SEQ ID NO: 59025 - RNA, 21 nt, Synthetic Construct
  source 1..21: mol_type = other RNA
tgaggtggtaggttgtatagt

SEQ ID NO: 59026 - RNA, 23 nt, Synthetic Construct
  source 1..23: mol_type = other RNA
tgaggtagtagtttgtgctgtta

SEQ ID NO: 59027 - RNA, 20 nt, Synthetic Construct
  source 1..20: mol_type = other RNA
tcccgggtttcggcaccatt

SEQ ID NO: 59028 - RNA, 22 nt, Synthetic Construct
  source 1..22: mol_type = other RNA
tgaggtagtagtctgtgctgtt

SEQ ID NO: 59029 - RNA, 22 nt, Synthetic Construct
  source 1..22: mol_type = other RNA
tgaggtagtagtctgtgctgtt

SEQ ID NO: 59030 - RNA, 30 nt, Synthetic Construct; identical to SEQ ID NO: 6467
  source 1..30: mol_type = other RNA

SEQ ID NO: 59031 - RNA, 25 nt, Synthetic Construct
  source 1..25: mol_type = other RNA
cgaatgttgctcggtgaaccccttt

SEQ ID NO: 59032 - RNA, 25 nt, Synthetic Construct
  source 1..25: mol_type = other RNA
cgaatgttgctcggtgaaccccttt

SEQ ID NO: 59033 - RNA, 20 nt, Synthetic Construct
  source 1..20: mol_type = other RNA
actgatcgagtcgtcctgcg

SEQ ID NO: 59034 - RNA, 20 nt, Synthetic Construct
  source 1..20: mol_type = other RNA
actgatcgagtcgtcctgcg

SEQ ID NO: 59035 - RNA, 19 nt, Synthetic Construct
  source 1..19: mol_type = other RNA
tgaggtagtagattgtata

SEQ ID NO: 59036 - RNA, 23 nt, Synthetic Construct
  source 1..23: mol_type = other RNA
tgaggggcagagagcgagacttt

SEQ ID NO: 59037 - RNA, 33 nt, Synthetic Construct; identical to SEQ ID NO: 2386
  source 1..33: mol_type = other RNA

SEQ ID NO: 59038 - RNA, 23 nt, Synthetic Construct
  source 1..23: mol_type = other RNA
tgaggtagtaggttgtgtggtaa

SEQ ID NO: 59039 - RNA, 23 nt, Synthetic Construct
  source 1..23: mol_type = other RNA
tgaggtagtaggttgtgtggtaa

SEQ ID NO: 59040 - RNA, 21 nt, Synthetic Construct
  source 1..21: mol_type = other RNA
ngaggtagtaggttgtgtggt

SEQ ID NO: 59041 - RNA, 21 nt, Synthetic Construct
  source 1..21: mol_type = other RNA
cgaggtagtaggttgtatagt

SEQ ID NO: 59042 - RNA, 21 nt, Synthetic Construct
  source 1..21: mol_type = other RNA
cactgatcgagtcgtcctgcg

SEQ ID NO: 59043 - RNA, 21 nt, Synthetic Construct
  source 1..21: mol_type = other RNA
acagcaggacggtggccatgg

SEQ ID NO: 59044 - RNA, 23 nt, Synthetic Construct
  source 1..23: mol_type = other RNA
cattgcacttgtctcggtctgaa

SEQ ID NO: 59045 - RNA, 23 nt, Synthetic Construct
  source 1..23: mol_type = other RNA
cattgcacttgtctcggtctgaa

SEQ ID NO: 59046 - RNA, 23 nt, Synthetic Construct
  source 1..23: mol_type = other RNA
tgtcagtttgtcaaatacccctt

SEQ ID NO: 59047 - RNA, 17 nt, Synthetic Construct
  source 1..17: mol_type = other RNA
acagtcaggatgttggc

SEQ ID NO: 59048 - RNA, 22 nt, Synthetic Construct
  source 1..22: mol_type = other RNA
tcgaaaccatcctctgctacca

SEQ ID NO: 59049 - RNA, 22 nt, Synthetic Construct
  source 1..22: mol_type = other RNA
tcgaaaccatcctctgctacca

SEQ ID NO: 59050 - RNA, 24 nt, Synthetic Construct
  source 1..24: mol_type = other RNA
tgtcagtttgtcaaataccccaat

SEQ ID NO: 59051 - RNA, 21 nt, Synthetic Construct
  source 1..21: mol_type = other RNA
gtgggcgtttgaagtgaagtg

SEQ ID NO: 59052 - RNA, 21 nt, Synthetic Construct
  source 1..21: mol_type = other RNA
gtgggcgtttgaagtgaagtg

SEQ ID NO: 59053 - RNA, 22 nt, Synthetic Construct
  source 1..22: mol_type = other RNA
tgaggtagtaggttgtatagtc

SEQ ID NO: 59054 - RNA, 17 nt, Synthetic Construct
  source 1..17: mol_type = other RNA
tcccagaaacccggtcg

SEQ ID NO: 59055 - RNA, 17 nt, Synthetic Construct
  source 1..17: mol_type = other RNA
tcccagaaacccggtcg

SEQ ID NO: 59056 - RNA, 33 nt, Synthetic Construct; identical to SEQ ID NO: 2638
  source 1..33: mol_type = other RNA

SEQ ID NO: 59057 - RNA, 21 nt, Synthetic Construct
  source 1..21: mol_type = other RNA
ttataatacaacctgataagt

SEQ ID NO: 59058 - RNA, 22 nt, Synthetic Construct
  source 1..22: mol_type = other RNA
gctcacggaaagagaatgaagc

SEQ ID NO: 59059 - RNA, 22 nt, Synthetic Construct
  source 1..22: mol_type = other RNA
gctcacggaaagagaatgaagc

SEQ ID NO: 59060 - RNA, 21 nt, Synthetic Construct
  source 1..21: mol_type = other RNA
tccttcattccaccggagtct

SEQ ID NO: 59061 - RNA, 21 nt, Synthetic Construct
  source 1..21: mol_type = other RNA
tagcttatcagactgatgttg

SEQ ID NO: 59062 - RNA, 27 nt, Synthetic Construct
  source 1..27: mol_type = other RNA
ccccccactgctgaatttgactggctt

SEQ ID NO: 59063 - RNA, 27 nt, Synthetic Construct
  source 1..27: mol_type = other RNA
ccccccactgctgaatttgactggctt

SEQ ID NO: 59064 - RNA, 21 nt, Synthetic Construct
  source 1..21: mol_type = other RNA
tcagtgcatcacagaactttg

SEQ ID NO: 59065 - RNA, 22 nt, Synthetic Construct
  source 1..22: mol_type = other RNA
cgagaactgaattccatgggtt

SEQ ID NO: 59066 - RNA, 22 nt, Synthetic Construct
  source 1..22: mol_type = other RNA
cgagaactgaattccatgggtt

SEQ ID NO: 59067 - RNA, 18 nt, Synthetic Construct
  source 1..18: mol_type = other RNA
gctattgacgaccgtacc

SEQ ID NO: 59068 - RNA, 21 nt, Synthetic Construct
  source 1..21: mol_type = other RNA
cagcattgtacagggctatga

SEQ ID NO: 59069 - RNA, 21 nt, Synthetic Construct
  source 1..21: mol_type = other RNA
actcggcgtggcgtcggtcgt

SEQ ID NO: 59070 - RNA, 26 nt, Synthetic Construct
  source 1..26: mol_type = other RNA
tcctgtactgagctgccccgagtttt

SEQ ID NO: 59071 - RNA, 23 nt, Synthetic Construct
  source 1..23: mol_type = other RNA
taaagtgctgttcgtgcaggtag

SEQ ID NO: 59072 - RNA, 27 nt, Synthetic Construct
  source 1..27: mol_type = other RNA
cccctcactgctaaatttgactggctt

SEQ ID NO: 59073 - RNA, 27 nt, Synthetic Construct
  source 1..27: mol_type = other RNA
cccctcactgctaaatttgactggctt

SEQ ID NO: 59074 - RNA, 20 nt, Synthetic Construct
  source 1..20: mol_type = other RNA
tagcagcacatcatggttta

SEQ ID NO: 59075 - RNA, 20 nt, Synthetic Construct
  source 1..20: mol_type = other RNA
tagcagcacatcatggttta

SEQ ID NO: 59076 - RNA, 17 nt, Synthetic Construct
  source 1..17: mol_type = other RNA
ccgtgtgaaagtaggtc

SEQ ID NO: 59077 - RNA, 30 nt, Synthetic Construct; identical to SEQ ID NO: 6405
  source 1..30: mol_type = other RNA

SEQ ID NO: 59078 - RNA, 30 nt, Synthetic Construct; identical to SEQ ID NO: 6405
  source 1..30: mol_type = other RNA

SEQ ID NO: 59079 - RNA, 22 nt, Synthetic Construct
  source 1..22: mol_type = other RNA
tgaggcagtaggttgtatagtt

SEQ ID NO: 59080 - RNA, 22 nt, Synthetic Construct
  source 1..22: mol_type = other RNA
tgaggcagtaggttgtatagtt

SEQ ID NO: 59081 - RNA, 22 nt, Synthetic Construct
  source 1..22: mol_type = other RNA
tcctgtactgtgctgccccgag

SEQ ID NO: 59082 - RNA, 29 nt, Synthetic Construct
  source 1..29: mol_type = other RNA
gcccggctagctcagtcggtagagcatgg

SEQ ID NO: 59083 - RNA, 29 nt, Synthetic Construct
  source 1..29: mol_type = other RNA
gcccggctagctcagtcggtagagcatgg

SEQ ID NO: 59084 - RNA, 21 nt, Synthetic Construct
  source 1..21: mol_type = other RNA
tgaggtagtagattgcatagt

SEQ ID NO: 59085 - RNA, 21 nt, Synthetic Construct
  source 1..21: mol_type = other RNA
tgaggtagtagattgcatagt

SEQ ID NO: 59086 - RNA, 18 nt, Synthetic Construct
  source 1..18: mol_type = other RNA
acagtcaggatgttggct

SEQ ID NO: 59087 - RNA, 18 nt, Synthetic Construct
  source 1..18: mol_type = other RNA
acagtcaggatgttggct

SEQ ID NO: 59088 - RNA, 27 nt, Synthetic Construct
  source 1..27: mol_type = other RNA
ccccccactgctaaattagactggctt

SEQ ID NO: 59089 - RNA, 27 nt, Synthetic Construct
  source 1..27: mol_type = other RNA
ccccccactgctaaattagactggctt

SEQ ID NO: 59090 - RNA, 21 nt, Synthetic Construct
  source 1..21: mol_type = other RNA
tgtgactggttgaccagaggg

SEQ ID NO: 59091 - RNA, 21 nt, Synthetic Construct
  source 1..21: mol_type = other RNA
tgtgactggttgaccagaggg

SEQ ID NO: 59092 - RNA, 23 nt, Synthetic Construct
  source 1..23: mol_type = other RNA
ttcaagtaattcaggataggtta

SEQ ID NO: 59093 - RNA, 23 nt, Synthetic Construct
  source 1..23: mol_type = other RNA
tcggatccgtctgagcttggctt

SEQ ID NO: 59094 - RNA, 22 nt, Synthetic Construct
  source 1..22: mol_type = other RNA
tagcggcacgtaaatattggcg

SEQ ID NO: 59095 - RNA, 22 nt, Synthetic Construct
  source 1..22: mol_type = other RNA
tagcggcacgtaaatattggcg

SEQ ID NO: 59096 - RNA, 22 nt, Synthetic Construct
  source 1..22: mol_type = other RNA
tgaggtagtaggttgtgcggtt

SEQ ID NO: 59097 - RNA, 26 nt, Synthetic Construct
  source 1..26: mol_type = other RNA
tgtcggctcatctcatcctggggctg

SEQ ID NO: 59098 - RNA, 26 nt, Synthetic Construct
  source 1..26: mol_type = other RNA
tgtcggctcatctcatcctggggctg

SEQ ID NO: 59099 - RNA, 22 nt, Synthetic Construct
  source 1..22: mol_type = other RNA
catagcacttgtctcggtctga

SEQ ID NO: 59100 - RNA, 29 nt, Synthetic Construct
  source 1..29: mol_type = other RNA
gtaatggcgggaactctggacagactgcc

SEQ ID NO: 59101 - RNA, 29 nt, Synthetic Construct
  source 1..29: mol_type = other RNA
gtaatggcgggaactctggacagactgcc

SEQ ID NO: 59102 - RNA, 21 nt, Synthetic Construct
  source 1..21: mol_type = other RNA
tgaggtagtaggtcgtatagt

SEQ ID NO: 59103 - RNA, 21 nt, Synthetic Construct
  source 1..21: mol_type = other RNA
tgaggtagtaggtcgtatagt

SEQ ID NO: 59104 - RNA, 20 nt, Synthetic Construct
  source 1..20: mol_type = other RNA
tgaggtagtaggttgtacag

SEQ ID NO: 59105 - RNA, 21 nt, Synthetic Construct
  source 1..21: mol_type = other RNA
tcctgtacagagctgccccga

SEQ ID NO: 59106 - RNA, 23 nt, Synthetic Construct
  source 1..23: mol_type = other RNA
tcctgcactgagctgccccgagt

SEQ ID NO: 59107 - RNA, 24 nt, Synthetic Construct
  source 1..24: mol_type = other RNA
tgtaaacatcctacactctcagct

SEQ ID NO: 59108 - RNA, 23 nt, Synthetic Construct
  source 1..23: mol_type = other RNA
tgaggggaagagagcgagacttt

SEQ ID NO: 59109 - RNA, 23 nt, Synthetic Construct
  source 1..23: mol_type = other RNA
tgaggggaagagagcgagacttt

SEQ ID NO: 59110 - RNA, 15 nt, Synthetic Construct
  source 1..15: mol_type = other RNA
gcaagtcgagcggta

SEQ ID NO: 59111 - RNA, 22 nt, Synthetic Construct
  source 1..22: mol_type = other RNA
tgaggtagtagattgcatagtt

SEQ ID NO: 59112 - RNA, 22 nt, Synthetic Construct
  source 1..22: mol_type = other RNA
tgaggtagtagattgcatagtt

SEQ ID NO: 59113 - RNA, 21 nt, Synthetic Construct
  source 1..21: mol_type = other RNA
tgaggtagtaggttgtgtggc

SEQ ID NO: 59114 - RNA, 21 nt, Synthetic Construct
  source 1..21: mol_type = other RNA
tggagtgtgacaatggcgttt

SEQ ID NO: 59115 - RNA, 21 nt, Synthetic Construct
  source 1..21: mol_type = other RNA
tggagtgtgacaatggcgttt

SEQ ID NO: 59116 - RNA, 28 nt, Synthetic Construct
  source 1..28: mol_type = other RNA
tcccacatggtctagcggttaggattcc

SEQ ID NO: 59117 - RNA, 16 nt, Synthetic Construct
  source 1..16: mol_type = other RNA
taacaggtctgtgatg

SEQ ID NO: 59118 - RNA, 16 nt, Synthetic Construct
  source 1..16: mol_type = other RNA
taacaggtctgtgatg

SEQ ID NO: 59119 - RNA, 25 nt, Synthetic Construct
  source 1..25: mol_type = other RNA
ttgaggatatgagatcgagacaaca

SEQ ID NO: 59120 - RNA, 22 nt, Synthetic Construct
  source 1..22: mol_type = other RNA
tgaggaagtaggttgtgtggtt

SEQ ID NO: 59121 - RNA, 22 nt, Synthetic Construct
  source 1..22: mol_type = other RNA
tgaggaagtaggttgtgtggtt

SEQ ID NO: 59122 - RNA, 22 nt, Synthetic Construct
  source 1..22: mol_type = other RNA
caaagtgcttacagtgcaggta

SEQ ID NO: 59123 - RNA, 22 nt, Synthetic Construct
  source 1..22: mol_type = other RNA
caaagtgcttacagtgcaggta

SEQ ID NO: 59124 - RNA, 25 nt, Synthetic Construct
  source 1..25: mol_type = other RNA
ggtaaaattgctgagtgaagcattg

SEQ ID NO: 59125 - RNA, 25 nt, Synthetic Construct
  source 1..25: mol_type = other RNA
ggtaaaattgctgagtgaagcattg

SEQ ID NO: 59126 - RNA, 22 nt, Synthetic Construct
  source 1..22: mol_type = other RNA
tgaggtagtagtctgtgctgtt

SEQ ID NO: 59127 - RNA, 26 nt, Synthetic Construct
  source 1..26: mol_type = other RNA
atttccccttggggttgtaggaccac

SEQ ID NO: 59128 - RNA, 26 nt, Synthetic Construct
  source 1..26: mol_type = other RNA
atttccccttggggttgtaggaccac

SEQ ID NO: 59129 - RNA, 23 nt, Synthetic Construct
  source 1..23: mol_type = other RNA
tcctgtacagagctgccccgaga

SEQ ID NO: 59130 - RNA, 21 nt, Synthetic Construct
  source 1..21: mol_type = other RNA
tgaggtagtagattgtatggt

SEQ ID NO: 59131 - RNA, 20 nt, Synthetic Construct
  source 1..20: mol_type = other RNA
tgacctatgaattgacagcc

SEQ ID NO: 59132 - RNA, 20 nt, Synthetic Construct
  source 1..20: mol_type = other RNA
tgacctatgaattgacagcc

SEQ ID NO: 59133 - RNA, 20 nt, Synthetic Construct
  source 1..20: mol_type = other RNA
tgaggtagtagtttgtacag

SEQ ID NO: 59134 - RNA, 20 nt, Synthetic Construct
  source 1..20: mol_type = other RNA
tgaggtagtagtttgtacag

SEQ ID NO: 59135 - RNA, 35 nt, Synthetic Construct; identical to SEQ ID NO: 737
  source 1..35: mol_type = other RNA

SEQ ID NO: 59136 - RNA, 35 nt, Synthetic Construct; identical to SEQ ID NO: 737
  source 1..35: mol_type = other RNA

SEQ ID NO: 59137 - RNA, 27 nt, Synthetic Construct
  source 1..27: mol_type = other RNA
ccccccacagctaaatttgactggcta

SEQ ID NO: 59138 - RNA, 27 nt, Synthetic Construct
  source 1..27: mol_type = other RNA
ccccccattgctaaatttgactggctt

SEQ ID NO: 59139 - RNA, 21 nt, Synthetic Construct
  source 1..21: mol_type = other RNA
cgtaccgtgagtaataatgtg

SEQ ID NO: 59140 - RNA, 23 nt, Synthetic Construct
  source 1..23: mol_type = other RNA
taccacagggtagaaccacggaa

SEQ ID NO: 59141 - RNA, 23 nt, Synthetic Construct
  source 1..23: mol_type = other RNA
taccacagggtagaaccacggaa

SEQ ID NO: 59142 - RNA, 25 nt, Synthetic Construct
  source 1..25: mol_type = other RNA
tgtaaacatccttgactggaagctt

SEQ ID NO: 59143 - RNA, 16 nt, Synthetic Construct
  source 1..16: mol_type = other RNA
gcgtagatatgcggag

SEQ ID NO: 59144 - RNA, 25 nt, Synthetic Construct
  source 1..25: mol_type = other RNA
atttccccttggggttgtaggacca

SEQ ID NO: 59145 - RNA, 25 nt, Synthetic Construct
  source 1..25: mol_type = other RNA
atttccccttggggttgtaggacca

SEQ ID NO: 59146 - RNA, 22 nt, Synthetic Construct
  source 1..22: mol_type = other RNA
tcgtaccgtgagtaatagtgcg

SEQ ID NO: 59147 - RNA, 21 nt, Synthetic Construct
  source 1..21: mol_type = other RNA
tgaggtagtaggctgtatagt

SEQ ID NO: 59148 - RNA, 21 nt, Synthetic Construct
  source 1..21: mol_type = other RNA
tgaggtagtaggctgtatagt

SEQ ID NO: 59149 - RNA, 22 nt, Synthetic Construct
  source 1..22: mol_type = other RNA
tagcagcacttaaatattggcg

SEQ ID NO: 59150 - RNA, 22 nt, Synthetic Construct
  source 1..22: mol_type = other RNA
tagcagcacttaaatattggcg

SEQ ID NO: 59151 - RNA, 22 nt, Synthetic Construct
  source 1..22: mol_type = other RNA
gatgcctgggagttgcgatctg

SEQ ID NO: 59152 - RNA, 22 nt, Synthetic Construct
  source 1..22: mol_type = other RNA
gatgcctgggagttgcgatctg

SEQ ID NO: 59153 - RNA, 23 nt, Synthetic Construct
  source 1..23: mol_type = other RNA
tgaggtagtaggttgtgcggttt

SEQ ID NO: 59154 - RNA, 30 nt, Synthetic Construct; identical to SEQ ID NO: 1079
  source 1..30: mol_type = other RNA

SEQ ID NO: 59155 - RNA, 30 nt, Synthetic Construct; identical to SEQ ID NO: 1079
  source 1..30: mol_type = other RNA

SEQ ID NO: 59156 - RNA, 24 nt, Synthetic Construct
  source 1..24: mol_type = other RNA
aaaccgttaccattactgagttta

SEQ ID NO: 59157 - RNA, 24 nt, Synthetic Construct
  source 1..24: mol_type = other RNA
aaaccgttaccattactgagttta

SEQ ID NO: 59158 - RNA, 24 nt, Synthetic Construct
  source 1..24: mol_type = other RNA
ttaatgctaatcgtgataggggtt

SEQ ID NO: 59159 - RNA, 21 nt, Synthetic Construct
  source 1..21: mol_type = other RNA
taaggtagtaggttgtatagt

SEQ ID NO: 59160 - RNA, 22 nt, Synthetic Construct
  source 1..22: mol_type = other RNA
tgaggtagtagattgtataatt

SEQ ID NO: 59161 - RNA, 22 nt, Synthetic Construct
  source 1..22: mol_type = other RNA
tgaggtagtagattgtataatt

SEQ ID NO: 59162 - RNA, 23 nt, Synthetic Construct
  source 1..23: mol_type = other RNA
ggctacattgtctgctgggtttc

SEQ ID NO: 59163 - RNA, 22 nt, Synthetic Construct
  source 1..22: mol_type = other RNA
tgtcccacccccactcctgttt

SEQ ID NO: 59164 - RNA, 22 nt, Synthetic Construct
  source 1..22: mol_type = other RNA
tgtcccacccccactcctgttt

SEQ ID NO: 59165 - RNA, 20 nt, Synthetic Construct
  source 1..20: mol_type = other RNA
cccttggggttgtaggacca

SEQ ID NO: 59166 - RNA, 20 nt, Synthetic Construct
  source 1..20: mol_type = other RNA
cccttggggttgtaggacca

SEQ ID NO: 59167 - RNA, 17 nt, Synthetic Construct
  source 1..17: mol_type = other RNA
gcgtagatatgcggagg

SEQ ID NO: 59168 - RNA, 20 nt, Synthetic Construct
  source 1..20: mol_type = other RNA
tgtcagtttgtcaaataccc

SEQ ID NO: 59169 - RNA, 21 nt, Synthetic Construct
  source 1..21: mol_type = other RNA
cgtaccgtgggtaataatgcg

SEQ ID NO: 59170 - RNA, 22 nt, Synthetic Construct
  source 1..22: mol_type = other RNA
tgaggtagtaaattgtatagtt

SEQ ID NO: 59171 - RNA, 23 nt, Synthetic Construct
  source 1..23: mol_type = other RNA
tcacacagaaatcgcacccgtct

SEQ ID NO: 59172 - RNA, 23 nt, Synthetic Construct
  source 1..23: mol_type = other RNA
tcacacagaaatcgcacccgtct

SEQ ID NO: 59173 - RNA, 17 nt, Synthetic Construct
  source 1..17: mol_type = other RNA
tcgctagtaatcgcgga

SEQ ID NO: 59174 - RNA, 43 nt, Synthetic Construct; identical to SEQ ID NO: 2315
  source 1..43: mol_type = other RNA

SEQ ID NO: 59175 - RNA, 19 nt, Synthetic Construct
  source 1..19: mol_type = other RNA
accgggtgctgtaggcttt

SEQ ID NO: 59176 - RNA, 19 nt, Synthetic Construct
  source 1..19: mol_type = other RNA
accgggtgctgtaggcttt

SEQ ID NO: 59177 - RNA, 22 nt, Synthetic Construct
  source 1..22: mol_type = other RNA
taggtagtttcctgttgttggg

SEQ ID NO: 59178 - RNA, 22 nt, Synthetic Construct
  source 1..22: mol_type = other RNA
taggtagtttcctgttgttggg

SEQ ID NO: 59179 - RNA, 22 nt, Synthetic Construct
  source 1..22: mol_type = other RNA
tcgtaacgtgagtaataatgcg

SEQ ID NO: 59180 - RNA, 23 nt, Synthetic Construct
  source 1..23: mol_type = other RNA
tggcaatacgacgtacttagtgt

SEQ ID NO: 59181 - RNA, 23 nt, Synthetic Construct
  source 1..23: mol_type = other RNA
tggcaatacgacgtacttagtgt

SEQ ID NO: 59182 - RNA, 22 nt, Synthetic Construct
  source 1..22: mol_type = other RNA
nagcagcacgtaaatattggcg

SEQ ID NO: 59183 - RNA, 22 nt, Synthetic Construct
  source 1..22: mol_type = other RNA
nagcagcacgtaaatattggcg

SEQ ID NO: 59184 - RNA, 21 nt, Synthetic Construct
  source 1..21: mol_type = other RNA
tggagtgtgacaatggtgtct

SEQ ID NO: 59185 - RNA, 21 nt, Synthetic Construct
  source 1..21: mol_type = other RNA
tggagtgtgacaatggtgtct

SEQ ID NO: 59186 - RNA, 23 nt, Synthetic Construct
  source 1..23: mol_type = other RNA
tggagtgtgacaatggtgtttgg

SEQ ID NO: 59187 - RNA, 23 nt, Synthetic Construct
  source 1..23: mol_type = other RNA
tcccgtactgagctgccccgagt

SEQ ID NO: 59188 - RNA, 23 nt, Synthetic Construct
  source 1..23: mol_type = other RNA
tcccgtactgagctgccccgagt

SEQ ID NO: 59189 - RNA, 23 nt, Synthetic Construct
  source 1..23: mol_type = other RNA
actcggcgtggcgtcggtcgtgg

SEQ ID NO: 59190 - RNA, 23 nt, Synthetic Construct
  source 1..23: mol_type = other RNA
actcggcgtggcgtcggtcgtgg

SEQ ID NO: 59191 - RNA, 20 nt, Synthetic Construct
  source 1..20: mol_type = other RNA
tgaggtagaaggttgtatag

SEQ ID NO: 59192 - RNA, 27 nt, Synthetic Construct
  source 1..27: mol_type = other RNA
ccccccactgctaaatttgaccggctt

SEQ ID NO: 59193 - RNA, 27 nt, Synthetic Construct
  source 1..27: mol_type = other RNA
ccccccactgctaaatttgaccggctt

SEQ ID NO: 59194 - RNA, 22 nt, Synthetic Construct
  source 1..22: mol_type = other RNA
tgaggtagtaggttgtatagta

SEQ ID NO: 59195 - RNA, 22 nt, Synthetic Construct
  source 1..22: mol_type = other RNA
tgaggtagtaggttgtatagta

SEQ ID NO: 59196 - RNA, 23 nt, Synthetic Construct
  source 1..23: mol_type = other RNA
caaagtgcagttcgtgcaggtag

SEQ ID NO: 59197 - RNA, 20 nt, Synthetic Construct
  source 1..20: mol_type = other RNA
tgaggtagtaagttgtattg

SEQ ID NO: 59198 - RNA, 20 nt, Synthetic Construct
  source 1..20: mol_type = other RNA
tgaggtagtaagttgtattg

SEQ ID NO: 59199 - RNA, 22 nt, Synthetic Construct
  source 1..22: mol_type = other RNA
tgaggtagtaggttgtatagct

SEQ ID NO: 59200 - RNA, 15 nt, Synthetic Construct
  source 1..15: mol_type = other RNA
aggtgggaggctttg

SEQ ID NO: 59201 - RNA, 15 nt, Synthetic Construct
  source 1..15: mol_type = other RNA
aggtgggaggctttg

SEQ ID NO: 59202 - RNA, 23 nt, Synthetic Construct
  source 1..23: mol_type = other RNA
ggatatcatcatatactgtaagt

SEQ ID NO: 59203 - RNA, 22 nt, Synthetic Construct
  source 1..22: mol_type = other RNA
cagcagcacgtaaatattggcg

SEQ ID NO: 59204 - RNA, 22 nt, Synthetic Construct
  source 1..22: mol_type = other RNA
cagcagcacgtaaatattggcg

SEQ ID NO: 59205 - RNA, 21 nt, Synthetic Construct
  source 1..21: mol_type = other RNA
tgaggtagtagattgtatggt

SEQ ID NO: 59206 - RNA, 23 nt, Synthetic Construct
  source 1..23: mol_type = other RNA
caaagtgctgttcgtgcaggtgg

SEQ ID NO: 59207 - RNA, 23 nt, Synthetic Construct
  source 1..23: mol_type = other RNA
caaagtgctgttcgtgcaggtgg

SEQ ID NO: 59208 - RNA, 33 nt, Synthetic Construct; identical to SEQ ID NO: 33377
  source 1..33: mol_type = other RNA

SEQ ID NO: 59209 - RNA, 33 nt, Synthetic Construct; identical to SEQ ID NO: 33377
  source 1..33: mol_type = other RNA

SEQ ID NO: 59210 - RNA, 23 nt, Synthetic Construct
  source 1..23: mol_type = other RNA
tgaggtagtaggttgtgcggttt

SEQ ID NO: 59211 - RNA, 20 nt, Synthetic Construct
  source 1..20: mol_type = other RNA
cccgtgttcggaagattttc

SEQ ID NO: 59212 - RNA, 20 nt, Synthetic Construct
  source 1..20: mol_type = other RNA
cccgtgttcggaagattttc

SEQ ID NO: 59213 - RNA, 27 nt, Synthetic Construct
  source 1..27: mol_type = other RNA
ccccccactgctaaatttgattggctt

SEQ ID NO: 59214 - RNA, 19 nt, Synthetic Construct
  source 1..19: mol_type = other RNA
gaaaagctgggttgagagg

SEQ ID NO: 59215 - RNA, 20 nt, Synthetic Construct
  source 1..20: mol_type = other RNA
tgaggtagtaggttgtatag

SEQ ID NO: 59216 - RNA, 23 nt, Synthetic Construct
  source 1..23: mol_type = other RNA
tggtaatacgacgtacttaatgt

SEQ ID NO: 59217 - RNA, 23 nt, Synthetic Construct
  source 1..23: mol_type = other RNA
tggtaatacgacgtacttaatgt

SEQ ID NO: 59218 - RNA, 19 nt, Synthetic Construct
  source 1..19: mol_type = other RNA
aggacagtgaaacgagtca

SEQ ID NO: 59219 - RNA, 30 nt, Synthetic Construct; identical to SEQ ID NO: 5879
  source 1..30: mol_type = other RNA

SEQ ID NO: 59220 - RNA, 30 nt, Synthetic Construct; identical to SEQ ID NO: 5879
  source 1..30: mol_type = other RNA

SEQ ID NO: 59221 - RNA, 22 nt, Synthetic Construct
  source 1..22: mol_type = other RNA
tgaggtagtaggttgcgtggtt

SEQ ID NO: 59222 - RNA, 22 nt, Synthetic Construct
  source 1..22: mol_type = other RNA
tattgcacttatcccggcctgt

SEQ ID NO: 59223 - RNA, 22 nt, Synthetic Construct
  source 1..22: mol_type = other RNA
tattgcacttatcccggcctgt

SEQ ID NO: 59224 - RNA, 15 nt, Synthetic Construct
  source 1..15: mol_type = other RNA
accgcttttgtcagg

SEQ ID NO: 59225 - RNA, 23 nt, Synthetic Construct
  source 1..23: mol_type = other RNA
caaagtgctgttcgtgcaggtaa

SEQ ID NO: 59226 - RNA, 24 nt, Synthetic Construct
  source 1..24: mol_type = other RNA
atcacattgccagggatttccaat

SEQ ID NO: 59227 - RNA, 22 nt, Synthetic Construct
  source 1..22: mol_type = other RNA
tagcagcacgtagatattggcg

SEQ ID NO: 59228 - RNA, 25 nt, Synthetic Construct
  source 1..25: mol_type = other RNA
ttgaggatatgagatagagacgaca

SEQ ID NO: 59229 - RNA, 21 nt, Synthetic Construct
  source 1..21: mol_type = other RNA
tgaggggcagagagcgaggct

SEQ ID NO: 59230 - RNA, 27 nt, Synthetic Construct
  source 1..27: mol_type = other RNA
ccccccactgctaaatttgactgactt

SEQ ID NO: 59231 - RNA, 27 nt, Synthetic Construct
  source 1..27: mol_type = other RNA
ccccccactgctaaatttgactgactt

SEQ ID NO: 59232 - RNA, 22 nt, Synthetic Construct
  source 1..22: mol_type = other RNA
tacaagtaatccaggataggct

SEQ ID NO: 59233 - RNA, 43 nt, Synthetic Construct; identical to SEQ ID NO: 6535
  source 1..43: mol_type = other RNA

SEQ ID NO: 59234 - RNA, 43 nt, Synthetic Construct; identical to SEQ ID NO: 6535
  source 1..43: mol_type = other RNA

SEQ ID NO: 59235 - RNA, 19 nt, Synthetic Construct
  source 1..19: mol_type = other RNA
cggaagaaggggtgcctgg

SEQ ID NO: 59236 - RNA, 19 nt, Synthetic Construct
  source 1..19: mol_type = other RNA
cggaagaaggggtgcctgg

SEQ ID NO: 59237 - RNA, 21 nt, Synthetic Construct
  source 1..21: mol_type = other RNA
gcagtagtctgcacattggtt

SEQ ID NO: 59238 - RNA, 24 nt, Synthetic Construct
  source 1..24: mol_type = other RNA
tgtaaacaaccccgactggaagct

SEQ ID NO: 59239 - RNA, 23 nt, Synthetic Construct
  source 1..23: mol_type = other RNA
gtcagtttgtcaaataccccaaa

SEQ ID NO: 59240 - RNA, 23 nt, Synthetic Construct
  source 1..23: mol_type = other RNA
gtcagtttgtcaaataccccaaa

SEQ ID NO: 59241 - RNA, 20 nt, Synthetic Construct
  source 1..20: mol_type = other RNA
tgagatagtaggttgtgtgg

SEQ ID NO: 59242 - RNA, 22 nt, Synthetic Construct
  source 1..22: mol_type = other RNA
ggtagcgaaattccttgtcggg

SEQ ID NO: 59243 - RNA, 22 nt, Synthetic Construct
  source 1..22: mol_type = other RNA
ggtagcgaaattccttgtcggg

SEQ ID NO: 59244 - RNA, 15 nt, Synthetic Construct
  source 1..15: mol_type = other RNA
ggtggctgtagctca

SEQ ID NO: 59245 - RNA, 15 nt, Synthetic Construct
  source 1..15: mol_type = other RNA
ggtggctgtagctca

SEQ ID NO: 59246 - RNA, 22 nt, Synthetic Construct
  source 1..22: mol_type = other RNA
tcctgtacagagctgccccgag

SEQ ID NO: 59247 - RNA, 32 nt, Synthetic Construct; identical to SEQ ID NO: 14681
  source 1..32: mol_type = other RNA

SEQ ID NO: 59248 - RNA, 32 nt, Synthetic Construct; identical to SEQ ID NO: 14681
  source 1..32: mol_type = other RNA

SEQ ID NO: 59249 - RNA, 18 nt, Synthetic Construct
  source 1..18: mol_type = other RNA
cacagtgtgaatcggcgc

SEQ ID NO: 59250 - RNA, 18 nt, Synthetic Construct
  source 1..18: mol_type = other RNA
cacagtgtgaatcggcgc

SEQ ID NO: 59251 - RNA, 22 nt, Synthetic Construct
  source 1..22: mol_type = other RNA
tgtagtgtctcctactttatgg

SEQ ID NO: 59252 - RNA, 22 nt, Synthetic Construct
  source 1..22: mol_type = other RNA
tgtagtgtctcctactttatgg

SEQ ID NO: 59253 - RNA, 24 nt, Synthetic Construct
  source 1..24: mol_type = other RNA
tgtaaacatccccgactggaggct

SEQ ID NO: 59254 - RNA, 24 nt, Synthetic Construct
  source 1..24: mol_type = other RNA
tgtaaacatccccgactggaggct

SEQ ID NO: 59255 - RNA, 23 nt, Synthetic Construct
  source 1..23: mol_type = other RNA
tagcagcacgtaaatattggcgt

SEQ ID NO: 59256 - RNA, 23 nt, Synthetic Construct
  source 1..23: mol_type = other RNA
tagcagcacgtaaatattggcgt

SEQ ID NO: 59257 - RNA, 22 nt, Synthetic Construct
  source 1..22: mol_type = other RNA
tgaggtagtaggttgtttagtt

SEQ ID NO: 59258 - RNA, 17 nt, Synthetic Construct
  source 1..17: mol_type = other RNA
cccctggacctgtactg

SEQ ID NO: 59259 - RNA, 17 nt, Synthetic Construct
  source 1..17: mol_type = other RNA
cccctggacctgtactg

SEQ ID NO: 59260 - RNA, 34 nt, Synthetic Construct; identical to SEQ ID NO: 16999
  source 1..34: mol_type = other RNA

SEQ ID NO: 59261 - RNA, 35 nt, Synthetic Construct; identical to SEQ ID NO: 1497
  source 1..35: mol_type = other RNA

SEQ ID NO: 59262 - RNA, 23 nt, Synthetic Construct
  source 1..23: mol_type = other RNA
agcagcgttgtacagggctatga

SEQ ID NO: 59263 - RNA, 23 nt, Synthetic Construct
  source 1..23: mol_type = other RNA
caaagtgctcatagtgcaggtag

SEQ ID NO: 59264 - RNA, 23 nt, Synthetic Construct
  source 1..23: mol_type = other RNA
caaagtgctcatagtgcaggtag

SEQ ID NO: 59265 - RNA, 23 nt, Synthetic Construct
  source 1..23: mol_type = other RNA
cagcggaatcccaaaagcagctg

SEQ ID NO: 59266 - RNA, 23 nt, Synthetic Construct
  source 1..23: mol_type = other RNA
taccacagggtagaaccacggac

SEQ ID NO: 59267 - RNA, 23 nt, Synthetic Construct
  source 1..23: mol_type = other RNA
taccacagggtagaaccacggac

SEQ ID NO: 59268 - RNA, 17 nt, Synthetic Construct
  source 1..17: mol_type = other RNA
atgcaagtcgaacggta

SEQ ID NO: 59269 - RNA, 23 nt, Synthetic Construct
  source 1..23: mol_type = other RNA
tcgaccggacctcgaccggctcg

SEQ ID NO: 59270 - RNA, 21 nt, Synthetic Construct
  source 1..21: mol_type = other RNA
tgaggtagtaggttatgtggt

SEQ ID NO: 59271 - RNA, 23 nt, Synthetic Construct
  source 1..23: mol_type = other RNA
tcttggagtaggtcattgggtga

SEQ ID NO: 59272 - RNA, 23 nt, Synthetic Construct
  source 1..23: mol_type = other RNA
tgaaacatacacgggaaacctct

SEQ ID NO: 59273 - RNA, 23 nt, Synthetic Construct
  source 1..23: mol_type = other RNA
tgaaacatacacgggaaacctct

SEQ ID NO: 59274 - RNA, 27 nt, Synthetic Construct
  source 1..27: mol_type = other RNA
gcatgggtggttcagtggtagaattct

SEQ ID NO: 59275 - RNA, 27 nt, Synthetic Construct
  source 1..27: mol_type = other RNA
gcatgggtggttcagtggtagaattct

SEQ ID NO: 59276 - RNA, 28 nt, Synthetic Construct
  source 1..28: mol_type = other RNA
ccccccactgctaaatttgactggcctt

SEQ ID NO: 59277 - RNA, 23 nt, Synthetic Construct
  source 1..23: mol_type = other RNA
tggtaatacgacgtacttagtga

SEQ ID NO: 59278 - RNA, 23 nt, Synthetic Construct
  source 1..23: mol_type = other RNA
tggtaatacgacgtacttagtga

SEQ ID NO: 59279 - RNA, 18 nt, Synthetic Construct
  source 1..18: mol_type = other RNA
atggccgggacagagggc

SEQ ID NO: 59280 - RNA, 24 nt, Synthetic Construct
  source 1..24: mol_type = other RNA
tgtcagtttgtcaaataccccaaa

SEQ ID NO: 59281 - RNA, 24 nt, Synthetic Construct
  source 1..24: mol_type = other RNA
tgtcagtttgtcaaataccccaaa

SEQ ID NO: 59282 - RNA, 22 nt, Synthetic Construct
  source 1..22: mol_type = other RNA
tggaatgtaaagaagtatgtaa

SEQ ID NO: 59283 - RNA, 22 nt, Synthetic Construct
  source 1..22: mol_type = other RNA
tggaatgtaaagaagtatgtaa

SEQ ID NO: 59284 - RNA, 22 nt, Synthetic Construct
  source 1..22: mol_type = other RNA
tggagtgtgacaatggtgcttg

SEQ ID NO: 59285 - RNA, 32 nt, Synthetic Construct; identical to SEQ ID NO: 770
  source 1..32: mol_type = other RNA

SEQ ID NO: 59286 - RNA, 32 nt, Synthetic Construct; identical to SEQ ID NO: 770
  source 1..32: mol_type = other RNA

SEQ ID NO: 59287 - RNA, 22 nt, Synthetic Construct
  source 1..22: mol_type = other RNA
tgtcaactggttgttgggaggg

SEQ ID NO: 59288 - RNA, 22 nt, Synthetic Construct
  source 1..22: mol_type = other RNA
tgtcaactggttgttgggaggg

SEQ ID NO: 59289 - RNA, 24 nt, Synthetic Construct
  source 1..24: mol_type = other RNA
ttaatgctaatcgtgataggggtt

SEQ ID NO: 59290 - RNA, 22 nt, Synthetic Construct
  source 1..22: mol_type = other RNA
aaactccttaagcgaatctcgc

SEQ ID NO: 59291 - RNA, 22 nt, Synthetic Construct
  source 1..22: mol_type = other RNA
aaactccttaagcgaatctcgc

SEQ ID NO: 59292 - RNA, 22 nt, Synthetic Construct
  source 1..22: mol_type = other RNA
tattgcacctgtcccggcctgt

SEQ ID NO: 59293 - RNA, 21 nt, Synthetic Construct
  source 1..21: mol_type = other RNA
tgaggtggtaggttgtatagt

SEQ ID NO: 59294 - RNA, 35 nt, Synthetic Construct; identical to SEQ ID NO: 2399
  source 1..35: mol_type = other RNA

SEQ ID NO: 59295 - RNA, 35 nt, Synthetic Construct; identical to SEQ ID NO: 2399
  source 1..35: mol_type = other RNA

SEQ ID NO: 59296 - RNA, 23 nt, Synthetic Construct
  source 1..23: mol_type = other RNA
tcctgtactgagccgccccgaga

SEQ ID NO: 59297 - RNA, 25 nt, Synthetic Construct
  source 1..25: mol_type = other RNA
tgtaaacatccccgactggaagctt

SEQ ID NO: 59298 - RNA, 25 nt, Synthetic Construct
  source 1..25: mol_type = other RNA
tgtaaacatccccgactggaagctt

SEQ ID NO: 59299 - RNA, 22 nt, Synthetic Construct
  source 1..22: mol_type = other RNA
tccttcattccaccggagtctg

SEQ ID NO: 59300 - RNA, 21 nt, Synthetic Construct
  source 1..21: mol_type = other RNA
cctctgggcccttcctccagt

SEQ ID NO: 59301 - RNA, 21 nt, Synthetic Construct
  source 1..21: mol_type = other RNA
cctctgggcccttcctccagt

SEQ ID NO: 59302 - RNA, 22 nt, Synthetic Construct
  source 1..22: mol_type = other RNA
ttctgtactgagctgccccgag

SEQ ID NO: 59303 - RNA, 22 nt, Synthetic Construct
  source 1..22: mol_type = other RNA
ttctgtactgagctgccccgag

SEQ ID NO: 59304 - RNA, 21 nt, Synthetic Construct
  source 1..21: mol_type = other RNA
aggttccggataagtaaagcc

SEQ ID NO: 59305 - RNA, 21 nt, Synthetic Construct
  source 1..21: mol_type = other RNA
aggttccggataagtaaagcc

SEQ ID NO: 59306 - RNA, 17 nt, Synthetic Construct
  source 1..17: mol_type = other RNA
cgcgacctcagatcaga

SEQ ID NO: 59307 - RNA, 23 nt, Synthetic Construct
  source 1..23: mol_type = other RNA
tagcaccatttgaaatcagtgtt

SEQ ID NO: 59308 - RNA, 23 nt, Synthetic Construct
  source 1..23: mol_type = other RNA
tagcaccatttgaaatcagtgtt

SEQ ID NO: 59309 - RNA, 21 nt, Synthetic Construct
  source 1..21: mol_type = other RNA
gtagcgaaattccttgtcggg

SEQ ID NO: 59310 - RNA, 20 nt, Synthetic Construct
  source 1..20: mol_type = other RNA
tgaggtaggaggttgtatag

SEQ ID NO: 59311 - RNA, 20 nt, Synthetic Construct
  source 1..20: mol_type = other RNA
tgaggtaggaggttgtatag

SEQ ID NO: 59312 - RNA, 22 nt, Synthetic Construct
  source 1..22: mol_type = other RNA
tgaggtagtagtttgtgcggtt

SEQ ID NO: 59313 - RNA, 22 nt, Synthetic Construct
  source 1..22: mol_type = other RNA
tgaggtagtagtttgtgcggtt

SEQ ID NO: 59314 - RNA, 22 nt, Synthetic Construct
  source 1..22: mol_type = other RNA
tattgcacttgtcccggcctat

SEQ ID NO: 59315 - RNA, 26 nt, Synthetic Construct
  source 1..26: mol_type = other RNA
tccctggtggtctagtggttaggatt

SEQ ID NO: 59316 - RNA, 21 nt, Synthetic Construct
  source 1..21: mol_type = other RNA
atgtcccacccccactcctgt

SEQ ID NO: 59317 - RNA, 21 nt, Synthetic Construct
  source 1..21: mol_type = other RNA
atgtcccacccccactcctgt

SEQ ID NO: 59318 - RNA, 22 nt, Synthetic Construct
  source 1..22: mol_type = other RNA
tggggtagtagtttgtgctgtt

SEQ ID NO: 59319 - RNA, 21 nt, Synthetic Construct
  source 1..21: mol_type = other RNA
tgaggtagaagattgtatagt

SEQ ID NO: 59320 - RNA, 21 nt, Synthetic Construct
  source 1..21: mol_type = other RNA
tgaggtagaagattgtatagt

SEQ ID NO: 59321 - RNA, 22 nt, Synthetic Construct
  source 1..22: mol_type = other RNA
cagcagcacgtaaatattggcg

SEQ ID NO: 59322 - RNA, 22 nt, Synthetic Construct
  source 1..22: mol_type = other RNA
cagcagcacgtaaatattggcg

SEQ ID NO: 59323 - RNA, 22 nt, Synthetic Construct
  source 1..22: mol_type = other RNA
tcgtaccgtgagtaatagtgcg

SEQ ID NO: 59324 - RNA, 22 nt, Synthetic Construct
  source 1..22: mol_type = other RNA
tcgtaccgtgagtaatagtgcg

SEQ ID NO: 59325 - RNA, 18 nt, Synthetic Construct
  source 1..18: mol_type = other RNA
ggtagcgtggccgagtgg

SEQ ID NO: 59326 - RNA, 18 nt, Synthetic Construct
  source 1..18: mol_type = other RNA
ggtagcgtggccgagtgg

SEQ ID NO: 59327 - RNA, 22 nt, Synthetic Construct
  source 1..22: mol_type = other RNA
tggggtagtaggttgtatagtt

SEQ ID NO: 59328 - RNA, 31 nt, Synthetic Construct; identical to SEQ ID NO: 5506
  source 1..31: mol_type = other RNA

SEQ ID NO: 59329 - RNA, 31 nt, Synthetic Construct; identical to SEQ ID NO: 5506
  source 1..31: mol_type = other RNA

SEQ ID NO: 59330 - RNA, 27 nt, Synthetic Construct
  source 1..27: mol_type = other RNA
ccccccattgctaaatttgactggctt

SEQ ID NO: 59331 - RNA, 22 nt, Synthetic Construct
  source 1..22: mol_type = other RNA
tgaggtagtagtatgtgctgtt

SEQ ID NO: 59332 - RNA, 23 nt, Synthetic Construct
  source 1..23: mol_type = other RNA
tggtaatacgatgtacttagtgt

SEQ ID NO: 59333 - RNA, 23 nt, Synthetic Construct
  source 1..23: mol_type = other RNA
tggtaatacgatgtacttagtgt

SEQ ID NO: 59334 - RNA, 25 nt, Synthetic Construct
  source 1..25: mol_type = other RNA
ttgcagctgcctgggagtgacttct

SEQ ID NO: 59335 - RNA, 25 nt, Synthetic Construct
  source 1..25: mol_type = other RNA
ttgcagctgcctgggagtgacttct

SEQ ID NO: 59336 - RNA, 21 nt, Synthetic Construct
  source 1..21: mol_type = other RNA
tgaggaagtaggttgtgtggt

SEQ ID NO: 59337 - RNA, 21 nt, Synthetic Construct
  source 1..21: mol_type = other RNA
tgaggaagtaggttgtgtggt

SEQ ID NO: 59338 - RNA, 22 nt, Synthetic Construct
  source 1..22: mol_type = other RNA
cattgcactagtctcggtctga

SEQ ID NO: 59339 - RNA, 22 nt, Synthetic Construct
  source 1..22: mol_type = other RNA
cattgcactagtctcggtctga

SEQ ID NO: 59340 - RNA, 17 nt, Synthetic Construct
  source 1..17: mol_type = other RNA
gactcttagcggtggat

SEQ ID NO: 59341 - RNA, 17 nt, Synthetic Construct
  source 1..17: mol_type = other RNA
gactcttagcggtggat

SEQ ID NO: 59342 - RNA, 22 nt, Synthetic Construct
  source 1..22: mol_type = other RNA
acagtagcctgcacattggtta

SEQ ID NO: 59343 - RNA, 22 nt, Synthetic Construct
  source 1..22: mol_type = other RNA
acagtagcctgcacattggtta

SEQ ID NO: 59344 - RNA, 22 nt, Synthetic Construct
  source 1..22: mol_type = other RNA
tgaggtagtaggttgtattgtt

SEQ ID NO: 59345 - RNA, 22 nt, Synthetic Construct
  source 1..22: mol_type = other RNA
tgagatagtaggttgtatagtt

SEQ ID NO: 59346 - RNA, 22 nt, Synthetic Construct
  source 1..22: mol_type = other RNA
tgagatagtaggttgtatagtt

SEQ ID NO: 59347 - RNA, 22 nt, Synthetic Construct
  source 1..22: mol_type = other RNA
tgaggtagtaagttgtgtggtt

SEQ ID NO: 59348 - RNA, 20 nt, Synthetic Construct
  source 1..20: mol_type = other RNA
attgcacttgtcccggcctg

SEQ ID NO: 59349 - RNA, 20 nt, Synthetic Construct
  source 1..20: mol_type = other RNA
attgcacttgtcccggcctg

SEQ ID NO: 59350 - RNA, 17 nt, Synthetic Construct
  source 1..17: mol_type = other RNA
gccatgccgcgtgcggg

SEQ ID NO: 59351 - RNA, 17 nt, Synthetic Construct
  source 1..17: mol_type = other RNA
gccatgccgcgtgcggg

SEQ ID NO: 59352 - RNA, 21 nt, Synthetic Construct
  source 1..21: mol_type = other RNA
tgaggtagtagtttgcgctgt

SEQ ID NO: 59353 - RNA, 21 nt, Synthetic Construct
  source 1..21: mol_type = other RNA
tgaggtagtagtttgcgctgt

SEQ ID NO: 59354 - RNA, 22 nt, Synthetic Construct
  source 1..22: mol_type = other RNA
tgagatagtaggttgtatagtt

SEQ ID NO: 59355 - RNA, 21 nt, Synthetic Construct
  source 1..21: mol_type = other RNA
tcagtgcactacagaactttg

SEQ ID NO: 59356 - RNA, 21 nt, Synthetic Construct
  source 1..21: mol_type = other RNA
tcagtgcactacagaactttg

SEQ ID NO: 59357 - RNA, 31 nt, Synthetic Construct; identical to SEQ ID NO: 14087
  source 1..31: mol_type = other RNA

SEQ ID NO: 59358 - RNA, 31 nt, Synthetic Construct; identical to SEQ ID NO: 14087
  source 1..31: mol_type = other RNA

SEQ ID NO: 59359 - RNA, 44 nt, Synthetic Construct; identical to SEQ ID NO: 722
  source 1..44: mol_type = other RNA

SEQ ID NO: 59360 - RNA, 44 nt, Synthetic Construct; identical to SEQ ID NO: 722
  source 1..44: mol_type = other RNA

SEQ ID NO: 59361 - RNA, 22 nt, Synthetic Construct
  source 1..22: mol_type = other RNA
tgagaactgaattccatgggtc

SEQ ID NO: 59362 - RNA, 23 nt, Synthetic Construct
  source 1..23: mol_type = other RNA
acctgtactgagctgccccgaga

SEQ ID NO: 59363 - RNA, 23 nt, Synthetic Construct
  source 1..23: mol_type = other RNA
acctgtactgagctgccccgaga

SEQ ID NO: 59364 - RNA, 22 nt, Synthetic Construct
  source 1..22: mol_type = other RNA
tgaggtagtagtttatgctgtt

SEQ ID NO: 59365 - RNA, 20 nt, Synthetic Construct
  source 1..20: mol_type = other RNA
agctacattgtctgctgggt

SEQ ID NO: 59366 - RNA, 20 nt, Synthetic Construct
  source 1..20: mol_type = other RNA
agctacattgtctgctgggt

SEQ ID NO: 59367 - RNA, 22 nt, Synthetic Construct
  source 1..22: mol_type = other RNA
tgaggtagtagtttgtgctggt

SEQ ID NO: 59368 - RNA, 32 nt, Synthetic Construct; identical to SEQ ID NO: 1237
  source 1..32: mol_type = other RNA

SEQ ID NO: 59369 - RNA, 32 nt, Synthetic Construct; identical to SEQ ID NO: 1237
  source 1..32: mol_type = other RNA

SEQ ID NO: 59370 - RNA, 23 nt, Synthetic Construct
  source 1..23: mol_type = other RNA
tgaggtagtaggttgtatagtta

SEQ ID NO: 59371 - RNA, 22 nt, Synthetic Construct
  source 1..22: mol_type = other RNA
tgaggtagtagtttgtatagtt

SEQ ID NO: 59372 - RNA, 22 nt, Synthetic Construct
  source 1..22: mol_type = other RNA
tgaggtagtagtttgtatagtt

SEQ ID NO: 59373 - RNA, 15 nt, Synthetic Construct
  source 1..15: mol_type = other RNA
cgccatttaaagagg

SEQ ID NO: 59374 - RNA, 21 nt, Synthetic Construct
  source 1..21: mol_type = other RNA
tggggtagtaggttgtatagt

SEQ ID NO: 59375 - RNA, 21 nt, Synthetic Construct
  source 1..21: mol_type = other RNA
tggggtagtaggttgtatagt

SEQ ID NO: 59376 - RNA, 21 nt, Synthetic Construct
  source 1..21: mol_type = other RNA
tcagtgcatcacagaactttg

SEQ ID NO: 59377 - RNA, 21 nt, Synthetic Construct
  source 1..21: mol_type = other RNA
tcagtgcatcacagaactttg

SEQ ID NO: 59378 - RNA, 22 nt, Synthetic Construct
  source 1..22: mol_type = other RNA
cgttgcacttgtctcggtctga

SEQ ID NO: 59379 - RNA, 22 nt, Synthetic Construct
  source 1..22: mol_type = other RNA
cgttgcacttgtctcggtctga

SEQ ID NO: 59380 - RNA, 22 nt, Synthetic Construct
  source 1..22: mol_type = other RNA
tagcagcacgtaaatataggcg

SEQ ID NO: 59381 - RNA, 22 nt, Synthetic Construct
  source 1..22: mol_type = other RNA
tagcagcacgtaaatataggcg

SEQ ID NO: 59382 - RNA, 15 nt, Synthetic Construct
  source 1..15: mol_type = other RNA
ggccgtcgtcagctc

SEQ ID NO: 59383 - RNA, 15 nt, Synthetic Construct
  source 1..15: mol_type = other RNA
ggccgtcgtcagctc

SEQ ID NO: 59384 - RNA, 15 nt, Synthetic Construct
  source 1..15: mol_type = other RNA
gtcaggatgttggct

SEQ ID NO: 59385 - RNA, 15 nt, Synthetic Construct
  source 1..15: mol_type = other RNA
gtcaggatgttggct

SEQ ID NO: 59386 - RNA, 27 nt, Synthetic Construct
  source 1..27: mol_type = other RNA
ccccccactgctgaatttgactggctt

SEQ ID NO: 59387 - RNA, 27 nt, Synthetic Construct
  source 1..27: mol_type = other RNA
ccccccactgctgaatttgactggctt

SEQ ID NO: 59388 - RNA, 19 nt, Synthetic Construct
  source 1..19: mol_type = other RNA
atctgctggaactgcaact

SEQ ID NO: 59389 - RNA, 19 nt, Synthetic Construct
  source 1..19: mol_type = other RNA
atctgctggaactgcaact

SEQ ID NO: 59390 - RNA, 17 nt, Synthetic Construct
  source 1..17: mol_type = other RNA
cctcgcgcgattggagc

SEQ ID NO: 59391 - RNA, 19 nt, Synthetic Construct
  source 1..19: mol_type = other RNA
gcgaaattccttgtcgggt

SEQ ID NO: 59392 - RNA, 22 nt, Synthetic Construct
  source 1..22: mol_type = other RNA
tattgtacttgtcccggcctgt

SEQ ID NO: 59393 - RNA, 22 nt, Synthetic Construct
  source 1..22: mol_type = other RNA
tattgtacttgtcccggcctgt

SEQ ID NO: 59394 - RNA, 21 nt, Synthetic Construct
  source 1..21: mol_type = other RNA
tgaggtagtaggttgtataga

SEQ ID NO: 59395 - RNA, 23 nt, Synthetic Construct
  source 1..23: mol_type = other RNA
cagagtgctgttcgtgcaggtag

SEQ ID NO: 59396 - RNA, 23 nt, Synthetic Construct
  source 1..23: mol_type = other RNA
cagagtgctgttcgtgcaggtag

SEQ ID NO: 59397 - RNA, 22 nt, Synthetic Construct
  source 1..22: mol_type = other RNA
tcctgtattgagctgccccgag

SEQ ID NO: 59398 - RNA, 23 nt, Synthetic Construct
  source 1..23: mol_type = other RNA
agggctgggtcggtcgggctggg

SEQ ID NO: 59399 - RNA, 23 nt, Synthetic Construct
  source 1..23: mol_type = other RNA
agggctgggtcggtcgggctggg

SEQ ID NO: 59400 - RNA, 22 nt, Synthetic Construct
  source 1..22: mol_type = other RNA
tcctgtactgagctgtcccgag

SEQ ID NO: 59401 - RNA, 17 nt, Synthetic Construct
  source 1..17: mol_type = other RNA
gtccggatcgtagtctg

SEQ ID NO: 59402 - RNA, 19 nt, Synthetic Construct
  source 1..19: mol_type = other RNA
aacggcgggagtaactatg

SEQ ID NO: 59403 - RNA, 23 nt, Synthetic Construct
  source 1..23: mol_type = other RNA
tccagtactgagctgccccgagt

SEQ ID NO: 59404 - RNA, 23 nt, Synthetic Construct
  source 1..23: mol_type = other RNA
tccagtactgagctgccccgagt

SEQ ID NO: 59405 - RNA, 20 nt, Synthetic Construct
  source 1..20: mol_type = other RNA
tgaggtagcaggttgtgtgg

SEQ ID NO: 59406 - RNA, 22 nt, Synthetic Construct
  source 1..22: mol_type = other RNA
tgaggcagtagtttgtgctgtt

SEQ ID NO: 59407 - RNA, 21 nt, Synthetic Construct
  source 1..21: mol_type = other RNA
cgaggtagtagattgtatagt

SEQ ID NO: 59408 - RNA, 21 nt, Synthetic Construct
  source 1..21: mol_type = other RNA
cgaggtagtagattgtatagt

SEQ ID NO: 59409 - RNA, 16 nt, Synthetic Construct
  source 1..16: mol_type = other RNA
gtctacggacatacca

SEQ ID NO: 59410 - RNA, 15 nt, Synthetic Construct
  source 1..15: mol_type = other RNA
acaagtcgaacggta

SEQ ID NO: 59411 - RNA, 15 nt, Synthetic Construct
  source 1..15: mol_type = other RNA
acaagtcgaacggta

SEQ ID NO: 59412 - RNA, 21 nt, Synthetic Construct
  source 1..21: mol_type = other RNA
tgaggggcggagagcgagact

SEQ ID NO: 59413 - RNA, 21 nt, Synthetic Construct
  source 1..21: mol_type = other RNA
tgaggggcggagagcgagact

SEQ ID NO: 59414 - RNA, 21 nt, Synthetic Construct
  source 1..21: mol_type = other RNA
cccataaagtagaaagcacta

SEQ ID NO: 59415 - RNA, 24 nt, Synthetic Construct
  source 1..24: mol_type = other RNA
tgtgaacatccccgactggaagct

SEQ ID NO: 59416 - RNA, 16 nt, Synthetic Construct
  source 1..16: mol_type = other RNA
gaacgtgagctgggtt

SEQ ID NO: 59417 - RNA, 16 nt, Synthetic Construct
  source 1..16: mol_type = other RNA
gaacgtgagctgggtt

SEQ ID NO: 59418 - RNA, 16 nt, Synthetic Construct
  source 1..16: mol_type = other RNA
gtccacggccatacca

SEQ ID NO: 59419 - RNA, 16 nt, Synthetic Construct
  source 1..16: mol_type = other RNA
gtccacggccatacca

SEQ ID NO: 59420 - RNA, 20 nt, Synthetic Construct
  source 1..20: mol_type = other RNA
tgtaaacatccttgactgga

SEQ ID NO: 59421 - RNA, 20 nt, Synthetic Construct
  source 1..20: mol_type = other RNA
tgtaaacatccttgactgga

SEQ ID NO: 59422 - RNA, 22 nt, Synthetic Construct
  source 1..22: mol_type = other RNA
tgaggtagtagtttgtgctgta

SEQ ID NO: 59423 - RNA, 22 nt, Synthetic Construct
  source 1..22: mol_type = other RNA
tgaggtagtagtttgtgctgta

SEQ ID NO: 59424 - RNA, 16 nt, Synthetic Construct
  source 1..16: mol_type = other RNA
gtgacgcgcatgaatg

SEQ ID NO: 59425 - RNA, 16 nt, Synthetic Construct
  source 1..16: mol_type = other RNA
gtgacgcgcatgaatg

SEQ ID NO: 59426 - RNA, 22 nt, Synthetic Construct
  source 1..22: mol_type = other RNA
aggggcagagagcgagactttt

SEQ ID NO: 59427 - RNA, 22 nt, Synthetic Construct
  source 1..22: mol_type = other RNA
aggggcagagagcgagactttt

SEQ ID NO: 59428 - RNA, 24 nt, Synthetic Construct
  source 1..24: mol_type = other RNA
tcagtgcatcacagaactttgttt

SEQ ID NO: 59429 - RNA, 24 nt, Synthetic Construct
  source 1..24: mol_type = other RNA
tcagtgcatcacagaactttgttt

SEQ ID NO: 59430 - RNA, 23 nt, Synthetic Construct
  source 1..23: mol_type = other RNA
tcctgtactgggctgccccgagt

SEQ ID NO: 59431 - RNA, 23 nt, Synthetic Construct
  source 1..23: mol_type = other RNA
tcctgtactgggctgccccgagt

SEQ ID NO: 59432 - RNA, 23 nt, Synthetic Construct
  source 1..23: mol_type = other RNA
caaagtgctcatagtgcaggtag

SEQ ID NO: 59433 - RNA, 23 nt, Synthetic Construct
  source 1..23: mol_type = other RNA
caaagtgctcatagtgcaggtag

SEQ ID NO: 59434 - RNA, 22 nt, Synthetic Construct
  source 1..22: mol_type = other RNA
tgtagtgcttcctactttatgg

SEQ ID NO: 59435 - RNA, 22 nt, Synthetic Construct
  source 1..22: mol_type = other RNA
tgtagtgcttcctactttatgg

SEQ ID NO: 59436 - RNA, 21 nt, Synthetic Construct
  source 1..21: mol_type = other RNA
tggggtagtaggttgtatagt

SEQ ID NO: 59437 - RNA, 16 nt, Synthetic Construct
  source 1..16: mol_type = other RNA
gaacgtgagctgggtt

SEQ ID NO: 59438 - RNA, 16 nt, Synthetic Construct
  source 1..16: mol_type = other RNA
gaacgtgagctgggtt

SEQ ID NO: 59439 - RNA, 24 nt, Synthetic Construct
  source 1..24: mol_type = other RNA
tcctccctcgggagggcgcgcggg

SEQ ID NO: 59440 - RNA, 24 nt, Synthetic Construct
  source 1..24: mol_type = other RNA
tcctccctcgggagggcgcgcggg

SEQ ID NO: 59441 - RNA, 16 nt, Synthetic Construct
  source 1..16: mol_type = other RNA
agtcaggatgttggct

SEQ ID NO: 59442 - RNA, 16 nt, Synthetic Construct
  source 1..16: mol_type = other RNA
agtcaggatgttggct

SEQ ID NO: 59443 - RNA, 22 nt, Synthetic Construct
  source 1..22: mol_type = other RNA
tagcagcacgtaaatactggcg

SEQ ID NO: 59444 - RNA, 21 nt, Synthetic Construct
  source 1..21: mol_type = other RNA
tggagtgtgacagtggtgttt

SEQ ID NO: 59445 - RNA, 21 nt, Synthetic Construct
  source 1..21: mol_type = other RNA
tggagtgtgacagtggtgttt

SEQ ID NO: 59446 - RNA, 21 nt, Synthetic Construct
  source 1..21: mol_type = other RNA
ggaggtagtaggttgtatagt

SEQ ID NO: 59447 - RNA, 21 nt, Synthetic Construct
  source 1..21: mol_type = other RNA
ggaggtagtaggttgtatagt

SEQ ID NO: 59448 - RNA, 24 nt, Synthetic Construct
  source 1..24: mol_type = other RNA
actcacacagaaatcgcacccgtc

SEQ ID NO: 59449 - RNA, 21 nt, Synthetic Construct
  source 1..21: mol_type = other RNA
tgaggtagaaggttgtgtggt

SEQ ID NO: 59450 - RNA, 18 nt, Synthetic Construct
  source 1..18: mol_type = other RNA
atcccactcctgacacca

SEQ ID NO: 59451 - RNA, 18 nt, Synthetic Construct
  source 1..18: mol_type = other RNA
atcccactcctgacacca

SEQ ID NO: 59452 - RNA, 16 nt, Synthetic Construct
  source 1..16: mol_type = other RNA
taactatgactctctt

SEQ ID NO: 59453 - RNA, 21 nt, Synthetic Construct
  source 1..21: mol_type = other RNA
agggctgggtcggtcgggctg

SEQ ID NO: 59454 - RNA, 21 nt, Synthetic Construct
  source 1..21: mol_type = other RNA
agggctgggtcggtcgggctg

SEQ ID NO: 59455 - RNA, 31 nt, Synthetic Construct; identical to SEQ ID NO: 1881
  source 1..31: mol_type = other RNA

SEQ ID NO: 59456 - RNA, 31 nt, Synthetic Construct; identical to SEQ ID NO: 1881
  source 1..31: mol_type = other RNA

SEQ ID NO: 59457 - RNA, 25 nt, Synthetic Construct
  source 1..25: mol_type = other RNA
gtgaggatatgagatcgagacgaca

SEQ ID NO: 59458 - RNA, 25 nt, Synthetic Construct
  source 1..25: mol_type = other RNA
gtgaggatatgagatcgagacgaca

SEQ ID NO: 59459 - RNA, 23 nt, Synthetic Construct
  source 1..23: mol_type = other RNA
tcctgtactgagctgccccggga

SEQ ID NO: 59460 - RNA, 21 nt, Synthetic Construct
  source 1..21: mol_type = other RNA
tgaggtagtgggttgtgtggt

SEQ ID NO: 59461 - RNA, 22 nt, Synthetic Construct
  source 1..22: mol_type = other RNA
tcaagagcaataacgaaaaatg

SEQ ID NO: 59462 - RNA, 34 nt, Synthetic Construct; identical to SEQ ID NO: 490
  source 1..34: mol_type = other RNA

SEQ ID NO: 59463 - RNA, 34 nt, Synthetic Construct; identical to SEQ ID NO: 490
  source 1..34: mol_type = other RNA

SEQ ID NO: 59464 - RNA, 23 nt, Synthetic Construct
  source 1..23: mol_type = other RNA
tcctatactgagctgccccgaga

SEQ ID NO: 59465 - RNA, 36 nt, Synthetic Construct; identical to SEQ ID NO: 2366
  source 1..36: mol_type = other RNA

SEQ ID NO: 59466 - RNA, 22 nt, Synthetic Construct
  source 1..22: mol_type = other RNA
tgaggttgtaggttgtatagtt

SEQ ID NO: 59467 - RNA, 22 nt, Synthetic Construct
  source 1..22: mol_type = other RNA
tgtcagtttgtcaaataccccg

SEQ ID NO: 59468 - RNA, 22 nt, Synthetic Construct
  source 1..22: mol_type = other RNA
tgtcagtttgtcaaataccccg

SEQ ID NO: 59469 - RNA, 21 nt, Synthetic Construct
  source 1..21: mol_type = other RNA
acagtagtctgcacattggtt

SEQ ID NO: 59470 - RNA, 22 nt, Synthetic Construct
  source 1..22: mol_type = other RNA
tgaggtagtaggttgaatagtt

SEQ ID NO: 59471 - RNA, 21 nt, Synthetic Construct
  source 1..21: mol_type = other RNA
tgaggcagtagattgtatagt

SEQ ID NO: 59472 - RNA, 15 nt, Synthetic Construct
  source 1..15: mol_type = other RNA
gctagtaatcgcgga

SEQ ID NO: 59473 - RNA, 36 nt, Synthetic Construct; identical to SEQ ID NO: 777
  source 1..36: mol_type = other RNA

SEQ ID NO: 59474 - RNA, 36 nt, Synthetic Construct; identical to SEQ ID NO: 777
  source 1..36: mol_type = other RNA

SEQ ID NO: 59475 - RNA, 22 nt, Synthetic Construct
  source 1..22: mol_type = other RNA
tcgtaccgtgagtaacaatgcg

SEQ ID NO: 59476 - RNA, 27 nt, Synthetic Construct
  source 1..27: mol_type = other RNA
ggatttccccttggggttgtaggacca

SEQ ID NO: 59477 - RNA, 27 nt, Synthetic Construct
  source 1..27: mol_type = other RNA
ggatttccccttggggttgtaggacca

SEQ ID NO: 59478 - RNA, 20 nt, Synthetic Construct
  source 1..20: mol_type = other RNA
gggttcgattccggagaggg

SEQ ID NO: 59479 - RNA, 20 nt, Synthetic Construct
  source 1..20: mol_type = other RNA
gggttcgattccggagaggg

SEQ ID NO: 59480 - RNA, 29 nt, Synthetic Construct
  source 1..29: mol_type = other RNA
gcattggtggttcagtggtagaattctcg

SEQ ID NO: 59481 - RNA, 29 nt, Synthetic Construct
  source 1..29: mol_type = other RNA
gcattggtggttcagtggtagaattctcg

SEQ ID NO: 59482 - RNA, 21 nt, Synthetic Construct
  source 1..21: mol_type = other RNA
tggagtgtgacgatggtgttt

SEQ ID NO: 59483 - RNA, 25 nt, Synthetic Construct
  source 1..25: mol_type = other RNA
gagaaagctcacaagaactgctaac

SEQ ID NO: 59484 - RNA, 25 nt, Synthetic Construct
  source 1..25: mol_type = other RNA
gagaaagctcacaagaactgctaac

SEQ ID NO: 59485 - RNA, 22 nt, Synthetic Construct
  source 1..22: mol_type = other RNA
tgaggtggtagtttgtgctgtt

SEQ ID NO: 59486 - RNA, 22 nt, Synthetic Construct
  source 1..22: mol_type = other RNA
agagttctacagtccgacgatc

SEQ ID NO: 59487 - RNA, 22 nt, Synthetic Construct
  source 1..22: mol_type = other RNA
agagttctacagtccgacgatc

SEQ ID NO: 59488 - RNA, 21 nt, Synthetic Construct
  source 1..21: mol_type = other RNA
tcctgtactgagctgccccaa

SEQ ID NO: 59489 - RNA, 21 nt, Synthetic Construct
  source 1..21: mol_type = other RNA
tgaggtagaaggttgtatagt

SEQ ID NO: 59490 - RNA, 25 nt, Synthetic Construct
  source 1..25: mol_type = other RNA
tcggatccgtctgagcttggctttt

SEQ ID NO: 59491 - RNA, 25 nt, Synthetic Construct
  source 1..25: mol_type = other RNA
tcggatccgtctgagcttggctttt

SEQ ID NO: 59492 - RNA, 22 nt, Synthetic Construct
  source 1..22: mol_type = other RNA
tgaggtagtaggttgtggggtt

SEQ ID NO: 59493 - RNA, 20 nt, Synthetic Construct
  source 1..20: mol_type = other RNA
agttctacagtccgacgatc

SEQ ID NO: 59494 - RNA, 20 nt, Synthetic Construct
  source 1..20: mol_type = other RNA
agttctacagtccgacgatc

SEQ ID NO: 59495 - RNA, 21 nt, Synthetic Construct
  source 1..21: mol_type = other RNA
cggagtgtgacaatggtgttt

SEQ ID NO: 59496 - RNA, 22 nt, Synthetic Construct
  source 1..22: mol_type = other RNA
tagcagcacgtaaaaattggcg

SEQ ID NO: 59497 - RNA, 22 nt, Synthetic Construct
  source 1..22: mol_type = other RNA
tagcagcacgtaaaaattggcg

SEQ ID NO: 59498 - RNA, 21 nt, Synthetic Construct
  source 1..21: mol_type = other RNA
cccttggggttgtaggaccac

SEQ ID NO: 59499 - RNA, 21 nt, Synthetic Construct
  source 1..21: mol_type = other RNA
cccttggggttgtaggaccac

SEQ ID NO: 59500 - RNA, 17 nt, Synthetic Construct
  source 1..17: mol_type = other RNA
ccaaggggtcgtgggtt

SEQ ID NO: 59501 - RNA, 17 nt, Synthetic Construct
  source 1..17: mol_type = other RNA
ccaaggggtcgtgggtt

SEQ ID NO: 59502 - RNA, 25 nt, Synthetic Construct
  source 1..25: mol_type = other RNA
gctcagtggaaaggatgtgaatcta

SEQ ID NO: 59503 - RNA, 25 nt, Synthetic Construct
  source 1..25: mol_type = other RNA
gctcagtggaaaggatgtgaatcta

SEQ ID NO: 59504 - RNA, 16 nt, Synthetic Construct
  source 1..16: mol_type = other RNA
gtctacggccatacca

SEQ ID NO: 59505 - RNA, 16 nt, Synthetic Construct
  source 1..16: mol_type = other RNA
gtctacggccatacca

SEQ ID NO: 59506 - RNA, 23 nt, Synthetic Construct
  source 1..23: mol_type = other RNA
tgaggtagtaggttgtatggttt

SEQ ID NO: 59507 - RNA, 22 nt, Synthetic Construct
  source 1..22: mol_type = other RNA
tgaggtaataggttgtgtggtt

SEQ ID NO: 59508 - RNA, 31 nt, Synthetic Construct; identical to SEQ ID NO: 2278
  source 1..31: mol_type = other RNA

SEQ ID NO: 59509 - RNA, 19 nt, Synthetic Construct
  source 1..19: mol_type = other RNA
ctgatcgagtcgtcctgcg

SEQ ID NO: 59510 - RNA, 20 nt, Synthetic Construct
  source 1..20: mol_type = other RNA
tcctgtctgaatatgggggg

SEQ ID NO: 59511 - RNA, 22 nt, Synthetic Construct
  source 1..22: mol_type = other RNA
tcgtaccgtgagtgataatgcg

SEQ ID NO: 59512 - RNA, 27 nt, Synthetic Construct
  source 1..27: mol_type = other RNA
ccccccactgctaaatttgactggcct

SEQ ID NO: 59513 - RNA, 27 nt, Synthetic Construct
  source 1..27: mol_type = other RNA
ccccccactgctaaatttgactggcct

SEQ ID NO: 59514 - RNA, 22 nt, Synthetic Construct
  source 1..22: mol_type = other RNA
tgaggtagtagtttgtgctgct

SEQ ID NO: 59515 - RNA, 22 nt, Synthetic Construct
  source 1..22: mol_type = other RNA
tgaggtagtaggttgtgtggtg

SEQ ID NO: 59516 - RNA, 27 nt, Synthetic Construct
  source 1..27: mol_type = other RNA
ccccccactgctaaatttggctggctt

SEQ ID NO: 59517 - RNA, 27 nt, Synthetic Construct
  source 1..27: mol_type = other RNA
ccccccactgctaaatttggctggctt

SEQ ID NO: 59518 - RNA, 21 nt, Synthetic Construct
  source 1..21: mol_type = other RNA
tagcttatcagactgatgttg

SEQ ID NO: 59519 - RNA, 21 nt, Synthetic Construct
  source 1..21: mol_type = other RNA
tagcttatcagactgatgttg

SEQ ID NO: 59520 - RNA, 22 nt, Synthetic Construct
  source 1..22: mol_type = other RNA
tgaagtagtagtttgtgctgtt

SEQ ID NO: 59521 - RNA, 22 nt, Synthetic Construct
  source 1..22: mol_type = other RNA
tgaagtagtagtttgtgctgtt

SEQ ID NO: 59522 - RNA, 24 nt, Synthetic Construct
  source 1..24: mol_type = other RNA
atgacacgatcactcccgttgagt

SEQ ID NO: 59523 - RNA, 23 nt, Synthetic Construct
  source 1..23: mol_type = other RNA
tacagtactgtgataactgaaga

SEQ ID NO: 59524 - RNA, 23 nt, Synthetic Construct
  source 1..23: mol_type = other RNA
tacagtactgtgataactgaaga

SEQ ID NO: 59525 - RNA, 23 nt, Synthetic Construct
  source 1..23: mol_type = other RNA
tcctgaactgagctgccccgaga

SEQ ID NO: 59526 - RNA, 23 nt, Synthetic Construct
  source 1..23: mol_type = other RNA
tcctgaactgagctgccccgaga

SEQ ID NO: 59527 - RNA, 30 nt, Synthetic Construct; identical to SEQ ID NO: 2274
  source 1..30: mol_type = other RNA

SEQ ID NO: 59528 - RNA, 23 nt, Synthetic Construct
  source 1..23: mol_type = other RNA
atgacacgatcactcccgttgag

SEQ ID NO: 59529 - RNA, 21 nt, Synthetic Construct
  source 1..21: mol_type = other RNA
tgaggtagtagatcgtatagt

SEQ ID NO: 59530 - RNA, 21 nt, Synthetic Construct
  source 1..21: mol_type = other RNA
tgaggtagtagatcgtatagt

SEQ ID NO: 59531 - RNA, 35 nt, Synthetic Construct; identical to SEQ ID NO: 2514
  source 1..35: mol_type = other RNA

SEQ ID NO: 59532 - RNA, 35 nt, Synthetic Construct; identical to SEQ ID NO: 2514
  source 1..35: mol_type = other RNA

SEQ ID NO: 59533 - RNA, 20 nt, Synthetic Construct
  source 1..20: mol_type = other RNA
caaagtgctgttcgtgcagg

SEQ ID NO: 59534 - RNA, 20 nt, Synthetic Construct
  source 1..20: mol_type = other RNA
caaagtgctgttcgtgcagg

SEQ ID NO: 59535 - RNA, 21 nt, Synthetic Construct
  source 1..21: mol_type = other RNA
tgaggggcagagagcgggact

SEQ ID NO: 59536 - RNA, 22 nt, Synthetic Construct
  source 1..22: mol_type = other RNA
cgaggtagtagattgtatagtt

SEQ ID NO: 59537 - RNA, 22 nt, Synthetic Construct
  source 1..22: mol_type = other RNA
cgaggtagtagattgtatagtt

SEQ ID NO: 59538 - RNA, 23 nt, Synthetic Construct
  source 1..23: mol_type = other RNA
naaagtgctgttcgtgcaggtag

SEQ ID NO: 59539 - RNA, 23 nt, Synthetic Construct
  source 1..23: mol_type = other RNA
naaagtgctgttcgtgcaggtag

SEQ ID NO: 59540 - RNA, 27 nt, Synthetic Construct
  source 1..27: mol_type = other RNA
ccccccactgctaaattcgactggctt

SEQ ID NO: 59541 - RNA, 27 nt, Synthetic Construct
  source 1..27: mol_type = other RNA
ccccccactgctaaattcgactggctt

SEQ ID NO: 59542 - RNA, 23 nt, Synthetic Construct
  source 1..23: mol_type = other RNA
tattgcacttgtcccggcctgaa

SEQ ID NO: 59543 - RNA, 17 nt, Synthetic Construct
  source 1..17: mol_type = other RNA
gcggctgtagctcagtt

SEQ ID NO: 59544 - RNA, 22 nt, Synthetic Construct
  source 1..22: mol_type = other RNA
gtaaacggcgggagtaactatg

SEQ ID NO: 59545 - RNA, 24 nt, Synthetic Construct
  source 1..24: mol_type = other RNA
tcctccctcgggagggcgcgcggg

SEQ ID NO: 59546 - RNA, 24 nt, Synthetic Construct
  source 1..24: mol_type = other RNA
tcctccctcgggagggcgcgcggg

SEQ ID NO: 59547 - RNA, 21 nt, Synthetic Construct
  source 1..21: mol_type = other RNA
tggggtagtagtttgtgctgt

SEQ ID NO: 59548 - RNA, 21 nt, Synthetic Construct
  source 1..21: mol_type = other RNA
tggggtagtagtttgtgctgt

SEQ ID NO: 59549 - RNA, 28 nt, Synthetic Construct
  source 1..28: mol_type = other RNA
gcatgggtggttcagtggtagaattctc

SEQ ID NO: 59550 - RNA, 28 nt, Synthetic Construct
  source 1..28: mol_type = other RNA
gcatgggtggttcagtggtagaattctc

SEQ ID NO: 59551 - RNA, 23 nt, Synthetic Construct
  source 1..23: mol_type = other RNA
atgacacgatcactcccgttgag

SEQ ID NO: 59552 - RNA, 23 nt, Synthetic Construct
  source 1..23: mol_type = other RNA
atgacacgatcactcccgttgag

SEQ ID NO: 59553 - RNA, 21 nt, Synthetic Construct
  source 1..21: mol_type = other RNA
taactcttaagcgaatctcgc

SEQ ID NO: 59554 - RNA, 21 nt, Synthetic Construct
  source 1..21: mol_type = other RNA
taactcttaagcgaatctcgc

SEQ ID NO: 59555 - RNA, 22 nt, Synthetic Construct
  source 1..22: mol_type = other RNA
tggagagaaaggcagttcctga

SEQ ID NO: 59556 - RNA, 22 nt, Synthetic Construct
  source 1..22: mol_type = other RNA
tggagagaaaggcagttcctga

SEQ ID NO: 59557 - RNA, 16 nt, Synthetic Construct
  source 1..16: mol_type = other RNA
gccagcagccgcggta

SEQ ID NO: 59558 - RNA, 22 nt, Synthetic Construct
  source 1..22: mol_type = other RNA
tgaggtggtagattgtatagtt

SEQ ID NO: 59559 - RNA, 22 nt, Synthetic Construct
  source 1..22: mol_type = other RNA
tgaggtggtagattgtatagtt

SEQ ID NO: 59560 - RNA, 24 nt, Synthetic Construct
  source 1..24: mol_type = other RNA
gaggtgtagaataggtgggagctt

SEQ ID NO: 59561 - RNA, 24 nt, Synthetic Construct
  source 1..24: mol_type = other RNA
gaggtgtagaataggtgggagctt

SEQ ID NO: 59562 - RNA, 23 nt, Synthetic Construct
  source 1..23: mol_type = other RNA
caaagtgctgttcatgcaggtag

SEQ ID NO: 59563 - RNA, 23 nt, Synthetic Construct
  source 1..23: mol_type = other RNA
caaagtgctgttcatgcaggtag

SEQ ID NO: 59564 - RNA, 18 nt, Synthetic Construct
  source 1..18: mol_type = other RNA
ctaatgagactgccggtg

SEQ ID NO: 59565 - RNA, 20 nt, Synthetic Construct
  source 1..20: mol_type = other RNA
taaggtagtaggttgtatag

SEQ ID NO: 59566 - RNA, 23 nt, Synthetic Construct
  source 1..23: mol_type = other RNA
aacggaatcccaaaagcagctgt

SEQ ID NO: 59567 - RNA, 22 nt, Synthetic Construct
  source 1..22: mol_type = other RNA
tgaggtagtagtttgtgccgtt

SEQ ID NO: 59568 - RNA, 27 nt, Synthetic Construct
  source 1..27: mol_type = other RNA
ccccccacagctaaatttgactggcta

SEQ ID NO: 59569 - RNA, 27 nt, Synthetic Construct
  source 1..27: mol_type = other RNA
ccccccacagctaaatttgactggcta

SEQ ID NO: 59570 - RNA, 22 nt, Synthetic Construct
  source 1..22: mol_type = other RNA
tgaggtaatagattgtatagtt

SEQ ID NO: 59571 - RNA, 22 nt, Synthetic Construct
  source 1..22: mol_type = other RNA
tgaggtaatagattgtatagtt

SEQ ID NO: 59572 - RNA, 24 nt, Synthetic Construct
  source 1..24: mol_type = other RNA
tgtagacatccccgactggaagct

SEQ ID NO: 59573 - RNA, 24 nt, Synthetic Construct
  source 1..24: mol_type = other RNA
tgtagacatccccgactggaagct

SEQ ID NO: 59574 - RNA, 25 nt, Synthetic Construct
  source 1..25: mol_type = other RNA
aatgacacgatcactcccgttgagt

SEQ ID NO: 59575 - RNA, 22 nt, Synthetic Construct
  source 1..22: mol_type = other RNA
tcgaatccgagtcacggcacca

SEQ ID NO: 59576 - RNA, 21 nt, Synthetic Construct
  source 1..21: mol_type = other RNA
tgaggggcagagagcgagact

SEQ ID NO: 59577 - RNA, 21 nt, Synthetic Construct
  source 1..21: mol_type = other RNA
tgaggggcagagagcgagact

SEQ ID NO: 59578 - RNA, 22 nt, Synthetic Construct
  source 1..22: mol_type = other RNA
tgaggtagtagtttgtgctgtc

SEQ ID NO: 59579 - RNA, 23 nt, Synthetic Construct
  source 1..23: mol_type = other RNA
caaagtgctgttcgtgcaggcag

SEQ ID NO: 59580 - RNA, 16 nt, Synthetic Construct
  source 1..16: mol_type = other RNA
tcagtagctcgaggaa

SEQ ID NO: 59581 - RNA, 21 nt, Synthetic Construct
  source 1..21: mol_type = other RNA
tgaggggcagggagcgagact

SEQ ID NO: 59582 - RNA, 21 nt, Synthetic Construct
  source 1..21: mol_type = other RNA
cgtaccgtgagtaatgatgcg

SEQ ID NO: 59583 - RNA, 21 nt, Synthetic Construct
  source 1..21: mol_type = other RNA
cgtaccgtgagtaatgatgcg

SEQ ID NO: 59584 - RNA, 21 nt, Synthetic Construct
  source 1..21: mol_type = other RNA
tagcagcacgtaaatattggc

SEQ ID NO: 59585 - RNA, 22 nt, Synthetic Construct
  source 1..22: mol_type = other RNA
tagcagcacgcaaatattggcg

SEQ ID NO: 59586 - RNA, 22 nt, Synthetic Construct
  source 1..22: mol_type = other RNA
tagcagcacgcaaatattggcg

SEQ ID NO: 59587 - RNA, 22 nt, Synthetic Construct
  source 1..22: mol_type = other RNA
tattgcacttgtcccggcccgt

SEQ ID NO: 59588 - RNA, 22 nt, Synthetic Construct
  source 1..22: mol_type = other RNA
ttgtaccgtgagtaataatgcg

SEQ ID NO: 59589 - RNA, 30 nt, Synthetic Construct; identical to SEQ ID NO: 1122
  source 1..30: mol_type = other RNA

SEQ ID NO: 59590 - RNA, 22 nt, Synthetic Construct
  source 1..22: mol_type = other RNA
agggctgggtcggtcgggctgg

SEQ ID NO: 59591 - RNA, 22 nt, Synthetic Construct
  source 1..22: mol_type = other RNA
agggctgggtcggtcgggctgg

SEQ ID NO: 59592 - RNA, 22 nt, Synthetic Construct
  source 1..22: mol_type = other RNA
cgcgacctcagatcagacgtgg

SEQ ID NO: 59593 - RNA, 22 nt, Synthetic Construct
  source 1..22: mol_type = other RNA
cgcgacctcagatcagacgtgg

SEQ ID NO: 59594 - RNA, 22 nt, Synthetic Construct
  source 1..22: mol_type = other RNA
tgaggtagtagtatgtgctgtt

SEQ ID NO: 59595 - RNA, 22 nt, Synthetic Construct
  source 1..22: mol_type = other RNA
tgaggtagtagtatgtgctgtt

SEQ ID NO: 59596 - RNA, 23 nt, Synthetic Construct
  source 1..23: mol_type = other RNA
gtcagtttgtcaaataccccaat

SEQ ID NO: 59597 - RNA, 21 nt, Synthetic Construct
  source 1..21: mol_type = other RNA
tgaggaagtaggttgtgtggt

SEQ ID NO: 59598 - RNA, 32 nt, Synthetic Construct; identical to SEQ ID NO: 1128
  source 1..32: mol_type = other RNA

SEQ ID NO: 59599 - RNA, 22 nt, Synthetic Construct
  source 1..22: mol_type = other RNA
tagcagcacataatggtttgtg

SEQ ID NO: 59600 - RNA, 23 nt, Synthetic Construct
  source 1..23: mol_type = other RNA
agcaacattgtctgctgggtttc

SEQ ID NO: 59601 - RNA, 23 nt, Synthetic Construct
  source 1..23: mol_type = other RNA
agcaacattgtctgctgggtttc

SEQ ID NO: 59602 - RNA, 22 nt, Synthetic Construct
  source 1..22: mol_type = other RNA
tgaggtaatagattgtatagtt

SEQ ID NO: 59603 - RNA, 22 nt, Synthetic Construct
  source 1..22: mol_type = other RNA
tgaggtaatagattgtatagtt

SEQ ID NO: 59604 - RNA, 22 nt, Synthetic Construct
  source 1..22: mol_type = other RNA
aaagtgctgttcgtgcaggtag

SEQ ID NO: 59605 - RNA, 21 nt, Synthetic Construct
  source 1..21: mol_type = other RNA
agcgtgcttgactgcgagact

SEQ ID NO: 59606 - RNA, 17 nt, Synthetic Construct
  source 1..17: mol_type = other RNA
gtgttcggaagattttc

SEQ ID NO: 59607 - RNA, 17 nt, Synthetic Construct
  source 1..17: mol_type = other RNA
gtgttcggaagattttc

SEQ ID NO: 59608 - RNA, 22 nt, Synthetic Construct
  source 1..22: mol_type = other RNA
tgaggtagtaggttgtgctgtt

SEQ ID NO: 59609 - RNA, 22 nt, Synthetic Construct
  source 1..22: mol_type = other RNA
tgaggtagtaggttgtgctgtt

SEQ ID NO: 59610 - RNA, 21 nt, Synthetic Construct
  source 1..21: mol_type = other RNA
tgaggtagtagactgtatagt

SEQ ID NO: 59611 - RNA, 23 nt, Synthetic Construct
  source 1..23: mol_type = other RNA
agcagcattgtacagggctatga

SEQ ID NO: 59612 - RNA, 22 nt, Synthetic Construct
  source 1..22: mol_type = other RNA
tcctgtactgagttgccccgag

SEQ ID NO: 59613 - RNA, 22 nt, Synthetic Construct
  source 1..22: mol_type = other RNA
tcctgtactgagttgccccgag

SEQ ID NO: 59614 - RNA, 23 nt, Synthetic Construct
  source 1..23: mol_type = other RNA
caacggaatcccaaaagcagcag

SEQ ID NO: 59615 - RNA, 23 nt, Synthetic Construct
  source 1..23: mol_type = other RNA
caacggaatcccaaaagcagcag

SEQ ID NO: 59616 - RNA, 20 nt, Synthetic Construct
  source 1..20: mol_type = other RNA
agctacattgtctgctgggt

SEQ ID NO: 59617 - RNA, 23 nt, Synthetic Construct
  source 1..23: mol_type = other RNA
tggtaatacgacgtacttagtat

SEQ ID NO: 59618 - RNA, 23 nt, Synthetic Construct
  source 1..23: mol_type = other RNA
tggtaatacgacgtacttagtat

SEQ ID NO: 59619 - RNA, 23 nt, Synthetic Construct
  source 1..23: mol_type = other RNA
ggcagggttcgtgactggggtga

SEQ ID NO: 59620 - RNA, 20 nt, Synthetic Construct
  source 1..20: mol_type = other RNA
tcctgtaccgatcaatagtg

SEQ ID NO: 59621 - RNA, 25 nt, Synthetic Construct
  source 1..25: mol_type = other RNA
cctcgcgcgattggagcggccgata

SEQ ID NO: 59622 - RNA, 25 nt, Synthetic Construct
  source 1..25: mol_type = other RNA
cctcgcgcgattggagcggccgata

SEQ ID NO: 59623 - RNA, 22 nt, Synthetic Construct
  source 1..22: mol_type = other RNA
tgaggtagtagtttgtgttgtt

SEQ ID NO: 59624 - RNA, 22 nt, Synthetic Construct
  source 1..22: mol_type = other RNA
tgaggtagtagtttgtgttgtt

SEQ ID NO: 59625 - RNA, 31 nt, Synthetic Construct; identical to SEQ ID NO: 15910
  source 1..31: mol_type = other RNA

SEQ ID NO: 59626 - RNA, 15 nt, Synthetic Construct
  source 1..15: mol_type = other RNA
gtccggatcgtagtc

SEQ ID NO: 59627 - RNA, 15 nt, Synthetic Construct
  source 1..15: mol_type = other RNA
gtccggatcgtagtc

SEQ ID NO: 59628 - RNA, 21 nt, Synthetic Construct
  source 1..21: mol_type = other RNA
tcctgaactgagctgccccga

SEQ ID NO: 59629 - RNA, 21 nt, Synthetic Construct
  source 1..21: mol_type = other RNA
tcctgaactgagctgccccga

SEQ ID NO: 59630 - RNA, 22 nt, Synthetic Construct
  source 1..22: mol_type = other RNA
nattgcacttgtcccggcctgt

SEQ ID NO: 59631 - RNA, 20 nt, Synthetic Construct
  source 1..20: mol_type = other RNA
tgacctatgaattgacagcc

SEQ ID NO: 59632 - RNA, 20 nt, Synthetic Construct
  source 1..20: mol_type = other RNA
tgacctatgaattgacagcc

SEQ ID NO: 59633 - RNA, 18 nt, Synthetic Construct
  source 1..18: mol_type = other RNA
gcaggacggtggccatgg

SEQ ID NO: 59634 - RNA, 24 nt, Synthetic Construct
  source 1..24: mol_type = other RNA
aggaagccctggaggggctggagg

SEQ ID NO: 59635 - RNA, 24 nt, Synthetic Construct
  source 1..24: mol_type = other RNA
aggaagccctggaggggctggagg

SEQ ID NO: 59636 - RNA, 22 nt, Synthetic Construct
  source 1..22: mol_type = other RNA
tgagatgaagcactgtagctca

SEQ ID NO: 59637 - RNA, 22 nt, Synthetic Construct
  source 1..22: mol_type = other RNA
tcgtaccgtgagcaataatgcg

SEQ ID NO: 59638 - RNA, 22 nt, Synthetic Construct
  source 1..22: mol_type = other RNA
tggaatgtaaagaagtatgtat

SEQ ID NO: 59639 - RNA, 18 nt, Synthetic Construct
  source 1..18: mol_type = other RNA
atcccactcctgacacca

SEQ ID NO: 59640 - RNA, 25 nt, Synthetic Construct
  source 1..25: mol_type = other RNA
ctgaggatatgagatcgagacgaca

SEQ ID NO: 59641 - RNA, 22 nt, Synthetic Construct
  source 1..22: mol_type = other RNA
tagcagcacgtagatattggcg

SEQ ID NO: 59642 - RNA, 22 nt, Synthetic Construct
  source 1..22: mol_type = other RNA
tagcagcacgtagatattggcg

SEQ ID NO: 59643 - RNA, 22 nt, Synthetic Construct
  source 1..22: mol_type = other RNA
caatgcacttgtctcggtctga

SEQ ID NO: 59644 - RNA, 22 nt, Synthetic Construct
  source 1..22: mol_type = other RNA
caatgcacttgtctcggtctga

SEQ ID NO: 59645 - RNA, 21 nt, Synthetic Construct
  source 1..21: mol_type = other RNA
ttagtgacgcgcatgaatgga

SEQ ID NO: 59646 - RNA, 21 nt, Synthetic Construct
  source 1..21: mol_type = other RNA
ttagtgacgcgcatgaatgga

SEQ ID NO: 59647 - RNA, 23 nt, Synthetic Construct
  source 1..23: mol_type = other RNA
tgaggtagtaggttgtatagttg

SEQ ID NO: 59648 - RNA, 22 nt, Synthetic Construct
  source 1..22: mol_type = other RNA
tgaggtaatagtttgtgctgtt

SEQ ID NO: 59649 - RNA, 21 nt, Synthetic Construct
  source 1..21: mol_type = other RNA
tggggtagtagtttgtgctgt

SEQ ID NO: 59650 - RNA, 22 nt, Synthetic Construct
  source 1..22: mol_type = other RNA
tcgtactgtgagtaataatgcg

SEQ ID NO: 59651 - RNA, 27 nt, Synthetic Construct
  source 1..27: mol_type = other RNA
ctccccactgctaaatttgactggctt

SEQ ID NO: 59652 - RNA, 22 nt, Synthetic Construct
  source 1..22: mol_type = other RNA
tgtcagtttgtcaaataccccg

SEQ ID NO: 59653 - RNA, 22 nt, Synthetic Construct
  source 1..22: mol_type = other RNA
tgtcagtttgtcaaataccccg

SEQ ID NO: 59654 - RNA, 16 nt, Synthetic Construct
  source 1..16: mol_type = other RNA
gtctacggccatacaa

SEQ ID NO: 59655 - RNA, 22 nt, Synthetic Construct
  source 1..22: mol_type = other RNA
aagctgccagttgaagaactgt

SEQ ID NO: 59656 - RNA, 22 nt, Synthetic Construct
  source 1..22: mol_type = other RNA
aagctgccagttgaagaactgt

SEQ ID NO: 59657 - RNA, 36 nt, Synthetic Construct; identical to SEQ ID NO: 10333
  source 1..36: mol_type = other RNA

SEQ ID NO: 59658 - RNA, 22 nt, Synthetic Construct
  source 1..22: mol_type = other RNA
tgaggtagtaggttgtaaagtt

SEQ ID NO: 59659 - RNA, 23 nt, Synthetic Construct
  source 1..23: mol_type = other RNA
tgtcagttcgtcaaataccccaa

SEQ ID NO: 59660 - RNA, 24 nt, Synthetic Construct
  source 1..24: mol_type = other RNA
gtgaaagtaggtcatcgtcaggct

SEQ ID NO: 59661 - RNA, 24 nt, Synthetic Construct
  source 1..24: mol_type = other RNA
gtgaaagtaggtcatcgtcaggct

SEQ ID NO: 59662 - RNA, 23 nt, Synthetic Construct
  source 1..23: mol_type = other RNA
caacggaatcccaagagcagctg

SEQ ID NO: 59663 - RNA, 22 nt, Synthetic Construct
  source 1..22: mol_type = other RNA
tagcagcacgtaaatattagcg

SEQ ID NO: 59664 - RNA, 21 nt, Synthetic Construct
  source 1..21: mol_type = other RNA
cgtaccgtgagtaataacgcg

SEQ ID NO: 59665 - RNA, 21 nt, Synthetic Construct
  source 1..21: mol_type = other RNA
tgaggcagtagattgtatagt

SEQ ID NO: 59666 - RNA, 21 nt, Synthetic Construct
  source 1..21: mol_type = other RNA
tgaggcagtagattgtatagt

SEQ ID NO: 59667 - RNA, 22 nt, Synthetic Construct
  source 1..22: mol_type = other RNA
ctgggtcggtcgggctggggcg

SEQ ID NO: 59668 - RNA, 22 nt, Synthetic Construct
  source 1..22: mol_type = other RNA
ctgggtcggtcgggctggggcg

SEQ ID NO: 59669 - RNA, 22 nt, Synthetic Construct
  source 1..22: mol_type = other RNA
tggagtgtgacaatggtgttta

SEQ ID NO: 59670 - RNA, 22 nt, Synthetic Construct
  source 1..22: mol_type = other RNA
tgaagtagtagattgtatagtt

SEQ ID NO: 59671 - RNA, 22 nt, Synthetic Construct
  source 1..22: mol_type = other RNA
tgaagtagtagattgtatagtt

SEQ ID NO: 59672 - RNA, 18 nt, Synthetic Construct
  source 1..18: mol_type = other RNA
atagggaacgtgagctgg

SEQ ID NO: 59673 - RNA, 18 nt, Synthetic Construct
  source 1..18: mol_type = other RNA
atagggaacgtgagctgg

SEQ ID NO: 59674 - RNA, 23 nt, Synthetic Construct
  source 1..23: mol_type = other RNA
tcctgtactgggctgccccgagt

SEQ ID NO: 59675 - RNA, 20 nt, Synthetic Construct
  source 1..20: mol_type = other RNA
tggctcagttcagcaggaaa

SEQ ID NO: 59676 - RNA, 20 nt, Synthetic Construct
  source 1..20: mol_type = other RNA
tggctcagttcagcaggaaa

SEQ ID NO: 59677 - RNA, 21 nt, Synthetic Construct
  source 1..21: mol_type = other RNA
tgaggtaggaggttgtatagt

SEQ ID NO: 59678 - RNA, 21 nt, Synthetic Construct
  source 1..21: mol_type = other RNA
tgaggtaggaggttgtatagt

SEQ ID NO: 59679 - RNA, 16 nt, Synthetic Construct
  source 1..16: mol_type = other RNA
gtctacggctatacca

SEQ ID NO: 59680 - RNA, 21 nt, Synthetic Construct
  source 1..21: mol_type = other RNA
tgaggtagtaggttgtgaggt

SEQ ID NO: 59681 - RNA, 16 nt, Synthetic Construct
  source 1..16: mol_type = other RNA
cccctggacctgtact

SEQ ID NO: 59682 - RNA, 22 nt, Synthetic Construct
  source 1..22: mol_type = other RNA
tgaggtagtagtttgtgctgtt

SEQ ID NO: 59683 - RNA, 19 nt, Synthetic Construct
  source 1..19: mol_type = other RNA
ggctggtccgaaggtagtg

SEQ ID NO: 59684 - RNA, 23 nt, Synthetic Construct
  source 1..23: mol_type = other RNA
caaggtgctgttcgtgcaggtag

SEQ ID NO: 59685 - RNA, 23 nt, Synthetic Construct
  source 1..23: mol_type = other RNA
tggtaacacgacgtacttagtgt

SEQ ID NO: 59686 - RNA, 23 nt, Synthetic Construct
  source 1..23: mol_type = other RNA
tggtaacacgacgtacttagtgt

SEQ ID NO: 59687 - RNA, 23 nt, Synthetic Construct
  source 1..23: mol_type = other RNA
agcagcattgtacagggctatga

SEQ ID NO: 59688 - RNA, 23 nt, Synthetic Construct
  source 1..23: mol_type = other RNA
agcagcattgtacagggctatga

SEQ ID NO: 59689 - RNA, 22 nt, Synthetic Construct
  source 1..22: mol_type = other RNA
tattgcacttgccccggcctgt

SEQ ID NO: 59690 - RNA, 22 nt, Synthetic Construct
  source 1..22: mol_type = other RNA
tattgcacttgccccggcctgt

SEQ ID NO: 59691 - RNA, 23 nt, Synthetic Construct
  source 1..23: mol_type = other RNA
agcagcattgtacagggctatgc

SEQ ID NO: 59692 - RNA, 25 nt, Synthetic Construct
  source 1..25: mol_type = other RNA
gactcttagcggtggatcactcggc

SEQ ID NO: 59693 - RNA, 25 nt, Synthetic Construct
  source 1..25: mol_type = other RNA
gactcttagcggtggatcactcggc

SEQ ID NO: 59694 - RNA, 21 nt, Synthetic Construct
  source 1..21: mol_type = other RNA
agctacattgtctgctgggtt

SEQ ID NO: 59695 - RNA, 22 nt, Synthetic Construct
  source 1..22: mol_type = other RNA
tcctgtactaagctgccccgag

SEQ ID NO: 59696 - RNA, 22 nt, Synthetic Construct
  source 1..22: mol_type = other RNA
tcctgtactaagctgccccgag

SEQ ID NO: 59697 - RNA, 22 nt, Synthetic Construct
  source 1..22: mol_type = other RNA
tgaggtagtaggttgtatggta

SEQ ID NO: 59698 - RNA, 22 nt, Synthetic Construct
  source 1..22: mol_type = other RNA
caacggaatcccaaaagcagct

SEQ ID NO: 59699 - RNA, 22 nt, Synthetic Construct
  source 1..22: mol_type = other RNA
caacggaatcccaaaagcagct

SEQ ID NO: 59700 - RNA, 19 nt, Synthetic Construct
  source 1..19: mol_type = other RNA
tctaatgagactgccggtg

SEQ ID NO: 59701 - RNA, 22 nt, Synthetic Construct
  source 1..22: mol_type = other RNA
tgaggcagtagtttgtgctgtt

SEQ ID NO: 59702 - RNA, 29 nt, Synthetic Construct
  source 1..29: mol_type = other RNA
tccctgtggtctagtggttaggattcggc

SEQ ID NO: 59703 - RNA, 29 nt, Synthetic Construct
  source 1..29: mol_type = other RNA
tccctgtggtctagtggttaggattcggc

SEQ ID NO: 59704 - RNA, 27 nt, Synthetic Construct
  source 1..27: mol_type = other RNA
ccccccgctgctaaatttgactggcta

SEQ ID NO: 59705 - RNA, 27 nt, Synthetic Construct
  source 1..27: mol_type = other RNA
tcctgagtagctcagcggcagagcggg

SEQ ID NO: 59706 - RNA, 27 nt, Synthetic Construct
  source 1..27: mol_type = other RNA
tcctgagtagctcagcggcagagcggg

SEQ ID NO: 59707 - RNA, 32 nt, Synthetic Construct; identical to SEQ ID NO: 7323
  source 1..32: mol_type = other RNA

SEQ ID NO: 59708 - RNA, 23 nt, Synthetic Construct
  source 1..23: mol_type = other RNA
caacggaatcccaaaggcagctg

SEQ ID NO: 59709 - RNA, 22 nt, Synthetic Construct
  source 1..22: mol_type = other RNA
tagcagcacgtaaatactggcg

SEQ ID NO: 59710 - RNA, 22 nt, Synthetic Construct
  source 1..22: mol_type = other RNA
tagcagcacgtaaatactggcg

SEQ ID NO: 59711 - RNA, 22 nt, Synthetic Construct
  source 1..22: mol_type = other RNA
tcctgtattgagctgccccgag

SEQ ID NO: 59712 - RNA, 22 nt, Synthetic Construct
  source 1..22: mol_type = other RNA
tagcagcacgtacatattggcg

SEQ ID NO: 59713 - RNA, 23 nt, Synthetic Construct
  source 1..23: mol_type = other RNA
caacggaatcccaaaagcggctg

SEQ ID NO: 59714 - RNA, 23 nt, Synthetic Construct
  source 1..23: mol_type = other RNA
caacggaatcccaaaagcggctg

SEQ ID NO: 59715 - RNA, 21 nt, Synthetic Construct
  source 1..21: mol_type = other RNA
cattattacttttggtacgcg

SEQ ID NO: 59716 - RNA, 22 nt, Synthetic Construct
  source 1..22: mol_type = other RNA
actcggcgtggcgtcggtcgtg

SEQ ID NO: 59717 - RNA, 22 nt, Synthetic Construct
  source 1..22: mol_type = other RNA
actcggcgtggcgtcggtcgtg

SEQ ID NO: 59718 - RNA, 20 nt, Synthetic Construct
  source 1..20: mol_type = other RNA
atcaagtaatccaggatagg

SEQ ID NO: 59719 - RNA, 20 nt, Synthetic Construct
  source 1..20: mol_type = other RNA
ggggatgtagctcagatggt

SEQ ID NO: 59720 - RNA, 22 nt, Synthetic Construct
  source 1..22: mol_type = other RNA
caatgcacttgtctcggtctga

SEQ ID NO: 59721 - RNA, 22 nt, Synthetic Construct
  source 1..22: mol_type = other RNA
caatgcacttgtctcggtctga

SEQ ID NO: 59722 - RNA, 27 nt, Synthetic Construct
  source 1..27: mol_type = other RNA
cagagttctacagtccgacgatcgatc

SEQ ID NO: 59723 - RNA, 27 nt, Synthetic Construct
  source 1..27: mol_type = other RNA
cagagttctacagtccgacgatcgatc

SEQ ID NO: 59724 - RNA, 23 nt, Synthetic Construct
  source 1..23: mol_type = other RNA
agctcggtctgaggcccctcaga

SEQ ID NO: 59725 - RNA, 23 nt, Synthetic Construct
  source 1..23: mol_type = other RNA
agctcggtctgaggcccctcaga

SEQ ID NO: 59726 - RNA, 22 nt, Synthetic Construct
  source 1..22: mol_type = other RNA
tcctgtactgggctgccccgag

SEQ ID NO: 59727 - RNA, 22 nt, Synthetic Construct
  source 1..22: mol_type = other RNA
tcctgtactgggctgccccgag

SEQ ID NO: 59728 - RNA, 23 nt, Synthetic Construct
  source 1..23: mol_type = other RNA
atcacattgccagggattaccac

SEQ ID NO: 59729 - RNA, 23 nt, Synthetic Construct
  source 1..23: mol_type = other RNA
atcacattgccagggattaccac

SEQ ID NO: 59730 - RNA, 27 nt, Synthetic Construct
  source 1..27: mol_type = other RNA
ccccccactgctaaatctgactggctt

SEQ ID NO: 59731 - RNA, 21 nt, Synthetic Construct
  source 1..21: mol_type = other RNA
tggggtagtagattgtatagt

SEQ ID NO: 59732 - RNA, 21 nt, Synthetic Construct
  source 1..21: mol_type = other RNA
tggggtagtagattgtatagt

SEQ ID NO: 59733 - RNA, 21 nt, Synthetic Construct
  source 1..21: mol_type = other RNA
tgaggtagtagattgtgtagt

SEQ ID NO: 59734 - RNA, 22 nt, Synthetic Construct
  source 1..22: mol_type = other RNA
gaagttgttcgtggtggattcg

SEQ ID NO: 59735 - RNA, 22 nt, Synthetic Construct
  source 1..22: mol_type = other RNA
gaagttgttcgtggtggattcg

SEQ ID NO: 59736 - RNA, 23 nt, Synthetic Construct
  source 1..23: mol_type = other RNA
caaagtgctgtacgtgcaggtag

SEQ ID NO: 59737 - RNA, 23 nt, Synthetic Construct
  source 1..23: mol_type = other RNA
caaagtgctgtacgtgcaggtag

SEQ ID NO: 59738 - RNA, 36 nt, Synthetic Construct; identical to SEQ ID NO: 1213
  source 1..36: mol_type = other RNA

SEQ ID NO: 59739 - RNA, 22 nt, Synthetic Construct
  source 1..22: mol_type = other RNA
cattgcacttgtcccggcctgt

SEQ ID NO: 59740 - RNA, 22 nt, Synthetic Construct
  source 1..22: mol_type = other RNA
cattgcacttgtcccggcctgt

SEQ ID NO: 59741 - RNA, 21 nt, Synthetic Construct
  source 1..21: mol_type = other RNA
taactccttaagcgaatctgc

SEQ ID NO: 59742 - RNA, 21 nt, Synthetic Construct
  source 1..21: mol_type = other RNA
taactccttaagcgaatctgc

SEQ ID NO: 59743 - RNA, 22 nt, Synthetic Construct
  source 1..22: mol_type = other RNA
ccctgtactgagctgccccgag

SEQ ID NO: 59744 - RNA, 22 nt, Synthetic Construct
  source 1..22: mol_type = other RNA
ccctgtactgagctgccccgag

SEQ ID NO: 59745 - RNA, 16 nt, Synthetic Construct
  source 1..16: mol_type = other RNA
tccgaaccgactagtg

SEQ ID NO: 59746 - RNA, 21 nt, Synthetic Construct
  source 1..21: mol_type = other RNA
gcccgtgttcggaagattttc

SEQ ID NO: 59747 - RNA, 21 nt, Synthetic Construct
  source 1..21: mol_type = other RNA
gcccgtgttcggaagattttc

SEQ ID NO: 59748 - RNA, 23 nt, Synthetic Construct
  source 1..23: mol_type = other RNA
tgaggtagtaggttgtgtagttt

SEQ ID NO: 59749 - RNA, 23 nt, Synthetic Construct
  source 1..23: mol_type = other RNA
tgaggtagtaggttgtgtagttt

SEQ ID NO: 59750 - RNA, 22 nt, Synthetic Construct
  source 1..22: mol_type = other RNA
tagcagcacgtaaatagtggcg

SEQ ID NO: 59751 - RNA, 22 nt, Synthetic Construct
  source 1..22: mol_type = other RNA
tagcagcacgtaaatagtggcg

SEQ ID NO: 59752 - RNA, 22 nt, Synthetic Construct
  source 1..22: mol_type = other RNA
tatcggaacgtgcccagtcgtg

SEQ ID NO: 59753 - RNA, 25 nt, Synthetic Construct
  source 1..25: mol_type = other RNA
gggttgtaaaccgcttttgtcaggg

SEQ ID NO: 59754 - RNA, 22 nt, Synthetic Construct
  source 1..22: mol_type = other RNA
tagcagcatgtaaatattggcg

SEQ ID NO: 59755 - RNA, 22 nt, Synthetic Construct
  source 1..22: mol_type = other RNA
tagcagcatgtaaatattggcg

SEQ ID NO: 59756 - RNA, 16 nt, Synthetic Construct
  source 1..16: mol_type = other RNA
ttcgattccggagagg

SEQ ID NO: 59757 - RNA, 16 nt, Synthetic Construct
  source 1..16: mol_type = other RNA
ttcgattccggagagg

SEQ ID NO: 59758 - RNA, 21 nt, Synthetic Construct
  source 1..21: mol_type = other RNA
tgaggtagtagtttgtacagt

SEQ ID NO: 59759 - RNA, 21 nt, Synthetic Construct
  source 1..21: mol_type = other RNA
tgaggtagtagtttgtacagt

SEQ ID NO: 59760 - RNA, 31 nt, Synthetic Construct; identical to SEQ ID NO: 2442
  source 1..31: mol_type = other RNA

SEQ ID NO: 59761 - RNA, 23 nt, Synthetic Construct
  source 1..23: mol_type = other RNA
caaagtgctgtacgtgcaggtag

SEQ ID NO: 59762 - RNA, 23 nt, Synthetic Construct
  source 1..23: mol_type = other RNA
caaagtgctgtacgtgcaggtag

SEQ ID NO: 59763 - RNA, 23 nt, Synthetic Construct
  source 1..23: mol_type = other RNA
tcccgtactgagctgccccgaga

SEQ ID NO: 59764 - RNA, 17 nt, Synthetic Construct
  source 1..17: mol_type = other RNA
cccctggacctgtactg

SEQ ID NO: 59765 - RNA, 17 nt, Synthetic Construct
  source 1..17: mol_type = other RNA
cccctggacctgtactg

SEQ ID NO: 59766 - RNA, 26 nt, Synthetic Construct
  source 1..26: mol_type = other RNA
gagcagctaataccgcatacgacctg

SEQ ID NO: 59767 - RNA, 21 nt, Synthetic Construct
  source 1..21: mol_type = other RNA
gagttctacagtccgacgatc

SEQ ID NO: 59768 - RNA, 21 nt, Synthetic Construct
  source 1..21: mol_type = other RNA
gagttctacagtccgacgatc

SEQ ID NO: 59769 - RNA, 21 nt, Synthetic Construct
  source 1..21: mol_type = other RNA
tggagtgtgacgatggtgttt

SEQ ID NO: 59770 - RNA, 21 nt, Synthetic Construct
  source 1..21: mol_type = other RNA
tggagtgtgacgatggtgttt

SEQ ID NO: 59771 - RNA, 27 nt, Synthetic Construct
  source 1..27: mol_type = other RNA
cccccccactgctaaatttgactggct

SEQ ID NO: 59772 - RNA, 27 nt, Synthetic Construct
  source 1..27: mol_type = other RNA
cccccccactgctaaatttgactggct

SEQ ID NO: 59773 - RNA, 31 nt, Synthetic Construct; identical to SEQ ID NO: 2333
  source 1..31: mol_type = other RNA

SEQ ID NO: 59774 - RNA, 18 nt, Synthetic Construct
  source 1..18: mol_type = other RNA
agcaggacggtggccatg

SEQ ID NO: 59775 - RNA, 18 nt, Synthetic Construct
  source 1..18: mol_type = other RNA
agcaggacggtggccatg

SEQ ID NO: 59776 - RNA, 23 nt, Synthetic Construct
  source 1..23: mol_type = other RNA
ggctacattgtctgctgggtttc

SEQ ID NO: 59777 - RNA, 22 nt, Synthetic Construct
  source 1..22: mol_type = other RNA
tcttggagtaggtcattgggtg

SEQ ID NO: 59778 - RNA, 17 nt, Synthetic Construct
  source 1..17: mol_type = other RNA
cgtgagctgggtttaga

SEQ ID NO: 59779 - RNA, 17 nt, Synthetic Construct
  source 1..17: mol_type = other RNA
cgtgagctgggtttaga

SEQ ID NO: 59780 - RNA, 16 nt, Synthetic Construct
  source 1..16: mol_type = other RNA
gaccctgttgagcttg

SEQ ID NO: 59781 - RNA, 16 nt, Synthetic Construct
  source 1..16: mol_type = other RNA
ggtgggggtcgttggt

SEQ ID NO: 59782 - RNA, 16 nt, Synthetic Construct
  source 1..16: mol_type = other RNA
ggtgggggtcgttggt

SEQ ID NO: 59783 - RNA, 28 nt, Synthetic Construct
  source 1..28: mol_type = other RNA
cccccccactgctaaatttgactggcta

SEQ ID NO: 59784 - RNA, 28 nt, Synthetic Construct
  source 1..28: mol_type = other RNA
cccccccactgctaaatttgactggcta

SEQ ID NO: 59785 - RNA, 16 nt, Synthetic Construct
  source 1..16: mol_type = other RNA
ggccgttcttagttgg

SEQ ID NO: 59786 - RNA, 22 nt, Synthetic Construct
  source 1..22: mol_type = other RNA
tcctgtactgagctgtcccgag

SEQ ID NO: 59787 - RNA, 20 nt, Synthetic Construct
  source 1..20: mol_type = other RNA
ctagactgaagctccttgag

SEQ ID NO: 59788 - RNA, 20 nt, Synthetic Construct
  source 1..20: mol_type = other RNA
ctagactgaagctccttgag

SEQ ID NO: 59789 - RNA, 27 nt, Synthetic Construct
  source 1..27: mol_type = other RNA
ccccccactgctaaatttaactggctt

SEQ ID NO: 59790 - RNA, 27 nt, Synthetic Construct
  source 1..27: mol_type = other RNA
ccccccactgctaaatttaactggctt

SEQ ID NO: 59791 - RNA, 23 nt, Synthetic Construct
  source 1..23: mol_type = other RNA
tggtaatacgacgtacttagtgt

SEQ ID NO: 59792 - RNA, 23 nt, Synthetic Construct
  source 1..23: mol_type = other RNA
tggtaatacgacgtacttagtgt

SEQ ID NO: 59793 - RNA, 23 nt, Synthetic Construct
  source 1..23: mol_type = other RNA
tgtcggtttgtcaaataccccaa

SEQ ID NO: 59794 - RNA, 23 nt, Synthetic Construct
  source 1..23: mol_type = other RNA
tgtcggtttgtcaaataccccaa

SEQ ID NO: 59795 - RNA, 19 nt, Synthetic Construct
  source 1..19: mol_type = other RNA
cctgtaccgatcaatagtg

SEQ ID NO: 59796 - RNA, 18 nt, Synthetic Construct
  source 1..18: mol_type = other RNA
atcgctagtaatcgcgga

SEQ ID NO: 59797 - RNA, 22 nt, Synthetic Construct
  source 1..22: mol_type = other RNA
tgaggaagtagattgtatagtt

SEQ ID NO: 59798 - RNA, 16 nt, Synthetic Construct
  source 1..16: mol_type = other RNA
gatctgtagctggtct

SEQ ID NO: 59799 - RNA, 20 nt, Synthetic Construct
  source 1..20: mol_type = other RNA
gctattgacgaccgtaccgc

SEQ ID NO: 59800 - RNA, 20 nt, Synthetic Construct
  source 1..20: mol_type = other RNA
gctattgacgaccgtaccgc

SEQ ID NO: 59801 - RNA, 21 nt, Synthetic Construct
  source 1..21: mol_type = other RNA
caatggccgggacagagggct

SEQ ID NO: 59802 - RNA, 21 nt, Synthetic Construct
  source 1..21: mol_type = other RNA
tgaggcagtagattgtatagt

SEQ ID NO: 59803 - RNA, 22 nt, Synthetic Construct
  source 1..22: mol_type = other RNA
tgaggtagtaggttgaatagtt

SEQ ID NO: 59804 - RNA, 22 nt, Synthetic Construct
  source 1..22: mol_type = other RNA
tgaggtagtaggttgaatagtt

SEQ ID NO: 59805 - RNA, 22 nt, Synthetic Construct
  source 1..22: mol_type = other RNA
tgaggtagtagtttgtgccgtt

SEQ ID NO: 59806 - RNA, 22 nt, Synthetic Construct
  source 1..22: mol_type = other RNA
tgaggtagtagtttgtgccgtt

SEQ ID NO: 59807 - RNA, 22 nt, Synthetic Construct
  source 1..22: mol_type = other RNA
taaggtagtagtttgtgctgtt

SEQ ID NO: 59808 - RNA, 22 nt, Synthetic Construct
  source 1..22: mol_type = other RNA
taaggtagtagtttgtgctgtt

SEQ ID NO: 59809 - RNA, 17 nt, Synthetic Construct
  source 1..17: mol_type = other RNA
cgaaattccttgtcggg

SEQ ID NO: 59810 - RNA, 25 nt, Synthetic Construct
  source 1..25: mol_type = other RNA
ttgagggtatgagatcgagacgaca

SEQ ID NO: 59811 - RNA, 22 nt, Synthetic Construct
  source 1..22: mol_type = other RNA
tagcagcacgtaaatataggcg

SEQ ID NO: 59812 - RNA, 21 nt, Synthetic Construct
  source 1..21: mol_type = other RNA
tgaggcagtagattgtatagt

SEQ ID NO: 59813 - RNA, 21 nt, Synthetic Construct
  source 1..21: mol_type = other RNA
tgaggcagtagattgtatagt

SEQ ID NO: 59814 - RNA, 32 nt, Synthetic Construct; identical to SEQ ID NO: 14681
  source 1..32: mol_type = other RNA

SEQ ID NO: 59815 - RNA, 32 nt, Synthetic Construct; identical to SEQ ID NO: 14681
  source 1..32: mol_type = other RNA

SEQ ID NO: 59816 - RNA, 22 nt, Synthetic Construct
  source 1..22: mol_type = other RNA
cattgcacttgtctcggcctga

SEQ ID NO: 59817 - RNA, 22 nt, Synthetic Construct
  source 1..22: mol_type = other RNA
tgaggtagtagtttgtatagtt

SEQ ID NO: 59818 - RNA, 22 nt, Synthetic Construct
  source 1..22: mol_type = other RNA
tgaggtagtagtttgtatagtt

SEQ ID NO: 59819 - RNA, 23 nt, Synthetic Construct
  source 1..23: mol_type = other RNA
tcccacatggtctagcggttagg

SEQ ID NO: 59820 - RNA, 18 nt, Synthetic Construct
  source 1..18: mol_type = other RNA
ttctacagtccgacgatc

SEQ ID NO: 59821 - RNA, 18 nt, Synthetic Construct
  source 1..18: mol_type = other RNA
ttctacagtccgacgatc

SEQ ID NO: 59822 - RNA, 17 nt, Synthetic Construct
  source 1..17: mol_type = other RNA
tggccgttcttagttgg

SEQ ID NO: 59823 - RNA, 17 nt, Synthetic Construct
  source 1..17: mol_type = other RNA
tggccgttcttagttgg

SEQ ID NO: 59824 - RNA, 23 nt, Synthetic Construct
  source 1..23: mol_type = other RNA
tcctgtactgagctgccacgaga

SEQ ID NO: 59825 - RNA, 23 nt, Synthetic Construct
  source 1..23: mol_type = other RNA
tcctgtactgagctgccacgaga

SEQ ID NO: 59826 - RNA, 21 nt, Synthetic Construct
  source 1..21: mol_type = other RNA
cccttggggttgtaggaccac

SEQ ID NO: 59827 - RNA, 21 nt, Synthetic Construct
  source 1..21: mol_type = other RNA
cccttggggttgtaggaccac

SEQ ID NO: 59828 - RNA, 22 nt, Synthetic Construct
  source 1..22: mol_type = other RNA
tattgcgcttgtcccggcctgt

SEQ ID NO: 59829 - RNA, 28 nt, Synthetic Construct
  source 1..28: mol_type = other RNA
cccccccactgctaaatttgactggcta

SEQ ID NO: 59830 - RNA, 21 nt, Synthetic Construct
  source 1..21: mol_type = other RNA
tcctgtactgagctgcctcga

SEQ ID NO: 59831 - RNA, 22 nt, Synthetic Construct
  source 1..22: mol_type = other RNA
tcctgtactgagctgccccgat

SEQ ID NO: 59832 - RNA, 22 nt, Synthetic Construct
  source 1..22: mol_type = other RNA
tcctgtactgagctgccccgat

SEQ ID NO: 59833 - RNA, 21 nt, Synthetic Construct
  source 1..21: mol_type = other RNA
tgaggtagtagtttgcgctgt

SEQ ID NO: 59834 - RNA, 21 nt, Synthetic Construct
  source 1..21: mol_type = other RNA
tgaggtagtagactgtatagt

SEQ ID NO: 59835 - RNA, 23 nt, Synthetic Construct
  source 1..23: mol_type = other RNA
tgaggtagcaggttgtgtggttt

SEQ ID NO: 59836 - RNA, 23 nt, Synthetic Construct
  source 1..23: mol_type = other RNA
tgaggtagcaggttgtgtggttt

SEQ ID NO: 59837 - RNA, 21 nt, Synthetic Construct
  source 1..21: mol_type = other RNA
tgaggtagtagatcgtatagt

SEQ ID NO: 59838 - RNA, 22 nt, Synthetic Construct
  source 1..22: mol_type = other RNA
ttcaagtaattcaggataggtc

SEQ ID NO: 59839 - RNA, 16 nt, Synthetic Construct
  source 1..16: mol_type = other RNA
gtctacggccatacta

SEQ ID NO: 59840 - RNA, 16 nt, Synthetic Construct
  source 1..16: mol_type = other RNA
gtctacggccatacta

SEQ ID NO: 59841 - RNA, 23 nt, Synthetic Construct
  source 1..23: mol_type = other RNA
caaagtgcagttcgtgcaggtag

SEQ ID NO: 59842 - RNA, 23 nt, Synthetic Construct
  source 1..23: mol_type = other RNA
caaagtgcagttcgtgcaggtag

SEQ ID NO: 59843 - RNA, 15 nt, Synthetic Construct
  source 1..15: mol_type = other RNA
gcaagccgaacggta

SEQ ID NO: 59844 - RNA, 22 nt, Synthetic Construct
  source 1..22: mol_type = other RNA
tggagtgtgacaatggtgcttg

SEQ ID NO: 59845 - RNA, 22 nt, Synthetic Construct
  source 1..22: mol_type = other RNA
tggagtgtgacaatggtgcttg

SEQ ID NO: 59846 - RNA, 24 nt, Synthetic Construct
  source 1..24: mol_type = other RNA
agcaacattgtctgctgggtttct

SEQ ID NO: 59847 - RNA, 18 nt, Synthetic Construct
  source 1..18: mol_type = other RNA
cctcgcgcgattggagcg

SEQ ID NO: 59848 - RNA, 18 nt, Synthetic Construct
  source 1..18: mol_type = other RNA
cctcgcgcgattggagcg

SEQ ID NO: 59849 - RNA, 20 nt, Synthetic Construct
  source 1..20: mol_type = other RNA
tgacctatgaattgacagcc

SEQ ID NO: 59850 - RNA, 20 nt, Synthetic Construct
  source 1..20: mol_type = other RNA
tgacctatgaattgacagcc

SEQ ID NO: 59851 - RNA, 34 nt, Synthetic Construct; identical to SEQ ID NO: 1506
  source 1..34: mol_type = other RNA

SEQ ID NO: 59852 - RNA, 34 nt, Synthetic Construct; identical to SEQ ID NO: 1506
  source 1..34: mol_type = other RNA

SEQ ID NO: 59853 - RNA, 20 nt, Synthetic Construct
  source 1..20: mol_type = other RNA
tcctgtctgaatatgggggg

SEQ ID NO: 59854 - RNA, 20 nt, Synthetic Construct
  source 1..20: mol_type = other RNA
tcctgtctgaatatgggggg

SEQ ID NO: 59855 - RNA, 21 nt, Synthetic Construct
  source 1..21: mol_type = other RNA
caaagtgctgttcgtgcaggt

SEQ ID NO: 59856 - RNA, 21 nt, Synthetic Construct
  source 1..21: mol_type = other RNA
caaagtgctgttcgtgcaggt

SEQ ID NO: 59857 - RNA, 24 nt, Synthetic Construct
  source 1..24: mol_type = other RNA
tgggtaatacgacgtacttagtgt

SEQ ID NO: 59858 - RNA, 24 nt, Synthetic Construct
  source 1..24: mol_type = other RNA
tgggtaatacgacgtacttagtgt

SEQ ID NO: 59859 - RNA, 21 nt, Synthetic Construct
  source 1..21: mol_type = other RNA
agagtaggacgttgccaggtt

SEQ ID NO: 59860 - RNA, 40 nt, Synthetic Construct; identical to SEQ ID NO: 11585
  source 1..40: mol_type = other RNA

SEQ ID NO: 59861 - RNA, 40 nt, Synthetic Construct; identical to SEQ ID NO: 11585
  source 1..40: mol_type = other RNA

SEQ ID NO: 59862 - RNA, 25 nt, Synthetic Construct
  source 1..25: mol_type = other RNA
ttgaggatatgagatcgagacgaca

SEQ ID NO: 59863 - RNA, 22 nt, Synthetic Construct
  source 1..22: mol_type = other RNA
tcggatccgtctgagcttggct

SEQ ID NO: 59864 - RNA, 22 nt, Synthetic Construct
  source 1..22: mol_type = other RNA
tcggatccgtctgagcttggct

SEQ ID NO: 59865 - RNA, 21 nt, Synthetic Construct
  source 1..21: mol_type = other RNA
tgaggcagtaggttgtatagt

SEQ ID NO: 59866 - RNA, 17 nt, Synthetic Construct
  source 1..17: mol_type = other RNA
atcgtgacgatagtgca

SEQ ID NO: 59867 - RNA, 29 nt, Synthetic Construct
  source 1..29: mol_type = other RNA
gcccggctagctcagtcggtagagcatgg

SEQ ID NO: 59868 - RNA, 29 nt, Synthetic Construct
  source 1..29: mol_type = other RNA
gcccggctagctcagtcggtagagcatgg

SEQ ID NO: 59869 - RNA, 21 nt, Synthetic Construct
  source 1..21: mol_type = other RNA
ctaggctgaagctccttgagg

SEQ ID NO: 59870 - RNA, 21 nt, Synthetic Construct
  source 1..21: mol_type = other RNA
agcgtgcttgactgcgagact

SEQ ID NO: 59871 - RNA, 21 nt, Synthetic Construct
  source 1..21: mol_type = other RNA
agcgtgcttgactgcgagact

SEQ ID NO: 59872 - RNA, 21 nt, Synthetic Construct
  source 1..21: mol_type = other RNA
gtcagtttgtcaaatacccca

SEQ ID NO: 59873 - RNA, 21 nt, Synthetic Construct
  source 1..21: mol_type = other RNA
gtcagtttgtcaaatacccca

SEQ ID NO: 59874 - RNA, 22 nt, Synthetic Construct
  source 1..22: mol_type = other RNA
tgaggtagtaggatgtgtggtt

SEQ ID NO: 59875 - RNA, 22 nt, Synthetic Construct
  source 1..22: mol_type = other RNA
tgaggtagtaggatgtgtggtt

SEQ ID NO: 59876 - RNA, 31 nt, Synthetic Construct; identical to SEQ ID NO: 2427
  source 1..31: mol_type = other RNA

SEQ ID NO: 59877 - RNA, 23 nt, Synthetic Construct
  source 1..23: mol_type = other RNA
ttggtccccttcaaccagctgtt

SEQ ID NO: 59878 - RNA, 23 nt, Synthetic Construct
  source 1..23: mol_type = other RNA
ttggtccccttcaaccagctgtt

SEQ ID NO: 59879 - RNA, 21 nt, Synthetic Construct
  source 1..21: mol_type = other RNA
tcctgtactgagctgccccgg

SEQ ID NO: 59880 - RNA, 21 nt, Synthetic Construct
  source 1..21: mol_type = other RNA
tcctgtactgagctgccccgg

SEQ ID NO: 59881 - RNA, 17 nt, Synthetic Construct
  source 1..17: mol_type = other RNA
ccaaggggtcgtgggtt

SEQ ID NO: 59882 - RNA, 17 nt, Synthetic Construct
  source 1..17: mol_type = other RNA
ccaaggggtcgtgggtt

SEQ ID NO: 59883 - RNA, 24 nt, Synthetic Construct
  source 1..24: mol_type = other RNA
actcggcgtggcgtcggtcgtggt

SEQ ID NO: 59884 - RNA, 24 nt, Synthetic Construct
  source 1..24: mol_type = other RNA
actcggcgtggcgtcggtcgtggt

SEQ ID NO: 59885 - RNA, 21 nt, Synthetic Construct
  source 1..21: mol_type = other RNA
ttaatgctaatcgtgataggg

SEQ ID NO: 59886 - RNA, 21 nt, Synthetic Construct
  source 1..21: mol_type = other RNA
ttaatgctaatcgtgataggg

SEQ ID NO: 59887 - RNA, 24 nt, Synthetic Construct
  source 1..24: mol_type = other RNA
tcccacatggtctagcggttagga

SEQ ID NO: 59888 - RNA, 24 nt, Synthetic Construct
  source 1..24: mol_type = other RNA
tcccacatggtctagcggttagga

SEQ ID NO: 59889 - RNA, 31 nt, Synthetic Construct; identical to SEQ ID NO: 758
  source 1..31: mol_type = other RNA

SEQ ID NO: 59890 - RNA, 31 nt, Synthetic Construct; identical to SEQ ID NO: 758
  source 1..31: mol_type = other RNA

SEQ ID NO: 59891 - RNA, 22 nt, Synthetic Construct
  source 1..22: mol_type = other RNA
tgtgcaaatctatgcaaaactg

SEQ ID NO: 59892 - RNA, 27 nt, Synthetic Construct
  source 1..27: mol_type = other RNA
ccccccgctgctaaatttgactggctt

SEQ ID NO: 59893 - RNA, 31 nt, Synthetic Construct; identical to SEQ ID NO: 9212
  source 1..31: mol_type = other RNA

SEQ ID NO: 59894 - RNA, 23 nt, Synthetic Construct
  source 1..23: mol_type = other RNA
tggtgatacgacgtacttagtgt

SEQ ID NO: 59895 - RNA, 23 nt, Synthetic Construct
  source 1..23: mol_type = other RNA
tggtgatacgacgtacttagtgt

SEQ ID NO: 59896 - RNA, 27 nt, Synthetic Construct
  source 1..27: mol_type = other RNA
ctccccactgctaaatttgactggctt

SEQ ID NO: 59897 - RNA, 27 nt, Synthetic Construct
  source 1..27: mol_type = other RNA
ctccccactgctaaatttgactggctt

SEQ ID NO: 59898 - RNA, 16 nt, Synthetic Construct
  source 1..16: mol_type = other RNA
ctctacggccatacca

SEQ ID NO: 59899 - RNA, 16 nt, Synthetic Construct
  source 1..16: mol_type = other RNA
ctctacggccatacca

SEQ ID NO: 59900 - RNA, 20 nt, Synthetic Construct
  source 1..20: mol_type = other RNA
ccgcagagtacagcttggga

SEQ ID NO: 59901 - RNA, 20 nt, Synthetic Construct
  source 1..20: mol_type = other RNA
ccgcagagtacagcttggga

SEQ ID NO: 59902 - RNA, 22 nt, Synthetic Construct
  source 1..22: mol_type = other RNA
tgagatagtagattgtatagtt

SEQ ID NO: 59903 - RNA, 22 nt, Synthetic Construct
  source 1..22: mol_type = other RNA
tgagatagtagattgtatagtt

SEQ ID NO: 59904 - RNA, 22 nt, Synthetic Construct
  source 1..22: mol_type = other RNA
tggctcagttcagcaggaacag

SEQ ID NO: 59905 - RNA, 23 nt, Synthetic Construct
  source 1..23: mol_type = other RNA
caaagtgctgttcgtgcaggcag

SEQ ID NO: 59906 - RNA, 23 nt, Synthetic Construct
  source 1..23: mol_type = other RNA
caaagtgctgttcgtgcaggcag

SEQ ID NO: 59907 - RNA, 22 nt, Synthetic Construct
  source 1..22: mol_type = other RNA
tccaagtaattcaggataggtt

SEQ ID NO: 59908 - RNA, 22 nt, Synthetic Construct
  source 1..22: mol_type = other RNA
tccaagtaattcaggataggtt

SEQ ID NO: 59909 - RNA, 21 nt, Synthetic Construct
  source 1..21: mol_type = other RNA
tgaggtagtagattgcatagt

SEQ ID NO: 59910 - RNA, 21 nt, Synthetic Construct
  source 1..21: mol_type = other RNA
tgaggtagtagattgcatagt

SEQ ID NO: 59911 - RNA, 27 nt, Synthetic Construct
  source 1..27: mol_type = other RNA
ccccccaccgctaaatttgactggctt

SEQ ID NO: 59912 - RNA, 27 nt, Synthetic Construct
  source 1..27: mol_type = other RNA
ccccccaccgctaaatttgactggctt

SEQ ID NO: 59913 - RNA, 16 nt, Synthetic Construct
  source 1..16: mol_type = other RNA
ggtagctcgttgggct

SEQ ID NO: 59914 - RNA, 16 nt, Synthetic Construct
  source 1..16: mol_type = other RNA
ggtagctcgttgggct

SEQ ID NO: 59915 - RNA, 27 nt, Synthetic Construct
  source 1..27: mol_type = other RNA
ccccccattgctaaatttgactggctt

SEQ ID NO: 59916 - RNA, 27 nt, Synthetic Construct
  source 1..27: mol_type = other RNA
ccccccattgctaaatttgactggctt

SEQ ID NO: 59917 - RNA, 23 nt, Synthetic Construct
  source 1..23: mol_type = other RNA
tcctgtactgagctgctccgaga

SEQ ID NO: 59918 - RNA, 23 nt, Synthetic Construct
  source 1..23: mol_type = other RNA
tcctgtactgagctgctccgaga

SEQ ID NO: 59919 - RNA, 27 nt, Synthetic Construct
  source 1..27: mol_type = other RNA
ccccccactgctaaatttgtctggctt

SEQ ID NO: 59920 - RNA, 27 nt, Synthetic Construct
  source 1..27: mol_type = other RNA
ccccccactgctaaatttgtctggctt

SEQ ID NO: 59921 - RNA, 21 nt, Synthetic Construct
  source 1..21: mol_type = other RNA
tgaggtagtaggttgtataga

SEQ ID NO: 59922 - RNA, 21 nt, Synthetic Construct
  source 1..21: mol_type = other RNA
tgaggtagtaggttgtataga

SEQ ID NO: 59923 - RNA, 27 nt, Synthetic Construct
  source 1..27: mol_type = other RNA
gctttacattggactttgaacagatct

SEQ ID NO: 59924 - RNA, 25 nt, Synthetic Construct
  source 1..25: mol_type = other RNA
aaaagctgggttgagagggcgattt

SEQ ID NO: 59925 - RNA, 25 nt, Synthetic Construct
  source 1..25: mol_type = other RNA
aaaagctgggttgagagggcgattt

SEQ ID NO: 59926 - RNA, 22 nt, Synthetic Construct
  source 1..22: mol_type = other RNA
tcctgtactgggctgccccgag

SEQ ID NO: 59927 - RNA, 22 nt, Synthetic Construct
  source 1..22: mol_type = other RNA
cattgcacttgtcccggtctga

SEQ ID NO: 59928 - RNA, 22 nt, Synthetic Construct
  source 1..22: mol_type = other RNA
cattgcacttgtcccggtctga

SEQ ID NO: 59929 - RNA, 23 nt, Synthetic Construct
  source 1..23: mol_type = other RNA
tgaggtagtaggtcgtgtggttt

SEQ ID NO: 59930 - RNA, 23 nt, Synthetic Construct
  source 1..23: mol_type = other RNA
cgagagtaggacgttgccaggtt

SEQ ID NO: 59931 - RNA, 23 nt, Synthetic Construct
  source 1..23: mol_type = other RNA
cgagagtaggacgttgccaggtt

SEQ ID NO: 59932 - RNA, 24 nt, Synthetic Construct
  source 1..24: mol_type = other RNA
atgacacgatcactcccgttgagt

SEQ ID NO: 59933 - RNA, 21 nt, Synthetic Construct
  source 1..21: mol_type = other RNA
cgtaccgcgagtaataatgcg

SEQ ID NO: 59934 - RNA, 21 nt, Synthetic Construct
  source 1..21: mol_type = other RNA
cgtaccgcgagtaataatgcg

SEQ ID NO: 59935 - RNA, 24 nt, Synthetic Construct
  source 1..24: mol_type = other RNA
ttccccttggggttgtaggaccac

SEQ ID NO: 59936 - RNA, 24 nt, Synthetic Construct
  source 1..24: mol_type = other RNA
ttccccttggggttgtaggaccac

SEQ ID NO: 59937 - RNA, 22 nt, Synthetic Construct
  source 1..22: mol_type = other RNA
tgaggtagtaggtcgtatagtt

SEQ ID NO: 59938 - RNA, 22 nt, Synthetic Construct
  source 1..22: mol_type = other RNA
tgaggtagtaggtcgtatagtt

SEQ ID NO: 59939 - RNA, 21 nt, Synthetic Construct
  source 1..21: mol_type = other RNA
tggagcgtgacaatggtgttt

SEQ ID NO: 59940 - RNA, 21 nt, Synthetic Construct
  source 1..21: mol_type = other RNA
cagtgcaatgttaaaagggca

SEQ ID NO: 59941 - RNA, 21 nt, Synthetic Construct
  source 1..21: mol_type = other RNA
cagtgcaatgttaaaagggca

SEQ ID NO: 59942 - RNA, 21 nt, Synthetic Construct
  source 1..21: mol_type = other RNA
ctagactgaagctccttgggg

SEQ ID NO: 59943 - RNA, 21 nt, Synthetic Construct
  source 1..21: mol_type = other RNA
ctagactgaagctccttgggg

SEQ ID NO: 59944 - RNA, 23 nt, Synthetic Construct
  source 1..23: mol_type = other RNA
agctacattgtctgctgggttcc

SEQ ID NO: 59945 - RNA, 23 nt, Synthetic Construct
  source 1..23: mol_type = other RNA
tgaggggcagagggcgagacttt

SEQ ID NO: 59946 - RNA, 23 nt, Synthetic Construct
  source 1..23: mol_type = other RNA
tgaggggcagagggcgagacttt

SEQ ID NO: 59947 - RNA, 22 nt, Synthetic Construct
  source 1..22: mol_type = other RNA
tgagaactgaattccatgggta

SEQ ID NO: 59948 - RNA, 22 nt, Synthetic Construct
  source 1..22: mol_type = other RNA
acagtagtctgcacattggtta

SEQ ID NO: 59949 - RNA, 22 nt, Synthetic Construct
  source 1..22: mol_type = other RNA
acagtagtctgcacattggtta

SEQ ID NO: 59950 - RNA, 27 nt, Synthetic Construct
  source 1..27: mol_type = other RNA
ccccctactgctaaatttgactggctt

SEQ ID NO: 59951 - RNA, 21 nt, Synthetic Construct
  source 1..21: mol_type = other RNA
tgtaaacatcctacactctca

SEQ ID NO: 59952 - RNA, 21 nt, Synthetic Construct
  source 1..21: mol_type = other RNA
tgtaaacatcctacactctca

SEQ ID NO: 59953 - RNA, 24 nt, Synthetic Construct
  source 1..24: mol_type = other RNA
aaaagctgggttgagagggcgaaa

SEQ ID NO: 59954 - RNA, 24 nt, Synthetic Construct
  source 1..24: mol_type = other RNA
aaaagctgggttgagagggcgaaa

SEQ ID NO: 59955 - RNA, 35 nt, Synthetic Construct; identical to SEQ ID NO: 2505
  source 1..35: mol_type = other RNA

SEQ ID NO: 59956 - RNA, 35 nt, Synthetic Construct; identical to SEQ ID NO: 2505
  source 1..35: mol_type = other RNA

SEQ ID NO: 59957 - RNA, 24 nt, Synthetic Construct
  source 1..24: mol_type = other RNA
caacggaatcccaaaagcagctgc

SEQ ID NO: 59958 - RNA, 18 nt, Synthetic Construct
  source 1..18: mol_type = other RNA
gtctgcctcagcgtcggt

SEQ ID NO: 59959 - RNA, 18 nt, Synthetic Construct
  source 1..18: mol_type = other RNA
gtctgcctcagcgtcggt

SEQ ID NO: 59960 - RNA, 21 nt, Synthetic Construct
  source 1..21: mol_type = other RNA
tgaggtagtaggttgtacagt

SEQ ID NO: 59961 - RNA, 21 nt, Synthetic Construct
  source 1..21: mol_type = other RNA
tgaggtagtaggttgtacagt

SEQ ID NO: 59962 - RNA, 22 nt, Synthetic Construct
  source 1..22: mol_type = other RNA
tgaggtagtagtttgtgcggtt

SEQ ID NO: 59963 - RNA, 27 nt, Synthetic Construct
  source 1..27: mol_type = other RNA
cccccccactgctaaatttgactggct

SEQ ID NO: 59964 - RNA, 27 nt, Synthetic Construct
  source 1..27: mol_type = other RNA
cccccccactgctaaatttgactggct

SEQ ID NO: 59965 - RNA, 21 nt, Synthetic Construct
  source 1..21: mol_type = other RNA
aggagtgtgacaatggtgttt

SEQ ID NO: 59966 - RNA, 20 nt, Synthetic Construct
  source 1..20: mol_type = other RNA
caggacagtgaaacgagtca

SEQ ID NO: 59967 - RNA, 21 nt, Synthetic Construct
  source 1..21: mol_type = other RNA
acagtagcctgcacattggtt

SEQ ID NO: 59968 - RNA, 24 nt, Synthetic Construct
  source 1..24: mol_type = other RNA
caacggaatcccaaaagcagctat

SEQ ID NO: 59969 - RNA, 16 nt, Synthetic Construct
  source 1..16: mol_type = other RNA
agggaacgtgagctgg

SEQ ID NO: 59970 - RNA, 16 nt, Synthetic Construct
  source 1..16: mol_type = other RNA
agggaacgtgagctgg

SEQ ID NO: 59971 - RNA, 23 nt, Synthetic Construct
  source 1..23: mol_type = other RNA
caaagtgctgtttgtgcaggtag

SEQ ID NO: 59972 - RNA, 23 nt, Synthetic Construct
  source 1..23: mol_type = other RNA
tagcagcacgtaaatattggcgt

SEQ ID NO: 59973 - RNA, 23 nt, Synthetic Construct
  source 1..23: mol_type = other RNA
tcacacagaaatcgcacccgtct

SEQ ID NO: 59974 - RNA, 23 nt, Synthetic Construct
  source 1..23: mol_type = other RNA
tcacacagaaatcgcacccgtct

SEQ ID NO: 59975 - RNA, 21 nt, Synthetic Construct
  source 1..21: mol_type = other RNA
tggagtgcgacaatggtgttt

SEQ ID NO: 59976 - RNA, 15 nt, Synthetic Construct
  source 1..15: mol_type = other RNA
cccagaaacccggtc

SEQ ID NO: 59977 - RNA, 22 nt, Synthetic Construct
  source 1..22: mol_type = other RNA
cattgcgcttgtctcggtctga

SEQ ID NO: 59978 - RNA, 22 nt, Synthetic Construct
  source 1..22: mol_type = other RNA
cattgcgcttgtctcggtctga

SEQ ID NO: 59979 - RNA, 22 nt, Synthetic Construct
  source 1..22: mol_type = other RNA
tgaggtagtaggttgtgctgtt

SEQ ID NO: 59980 - RNA, 22 nt, Synthetic Construct
  source 1..22: mol_type = other RNA
tgaggtagtaggttgtgctgtt

SEQ ID NO: 59981 - RNA, 15 nt, Synthetic Construct
  source 1..15: mol_type = other RNA
gttcggaagattttc

SEQ ID NO: 59982 - RNA, 15 nt, Synthetic Construct
  source 1..15: mol_type = other RNA
gttcggaagattttc

SEQ ID NO: 59983 - RNA, 33 nt, Synthetic Construct; identical to SEQ ID NO: 2209
  source 1..33: mol_type = other RNA

SEQ ID NO: 59984 - RNA, 33 nt, Synthetic Construct; identical to SEQ ID NO: 2209
  source 1..33: mol_type = other RNA

SEQ ID NO: 59985 - RNA, 16 nt, Synthetic Construct
  source 1..16: mol_type = other RNA
ccgcttttgtcaggga

SEQ ID NO: 59986 - RNA, 16 nt, Synthetic Construct
  source 1..16: mol_type = other RNA
gctattgacgaccgta

SEQ ID NO: 59987 - RNA, 25 nt, Synthetic Construct
  source 1..25: mol_type = other RNA
gtgaggatatgagatcgagacgaca

SEQ ID NO: 59988 - RNA, 41 nt, Synthetic Construct; identical to SEQ ID NO: 10630
  source 1..41: mol_type = other RNA

SEQ ID NO: 59989 - RNA, 41 nt, Synthetic Construct; identical to SEQ ID NO: 10630
  source 1..41: mol_type = other RNA

SEQ ID NO: 59990 - RNA, 30 nt, Synthetic Construct; identical to SEQ ID NO: 1079
  source 1..30: mol_type = other RNA

SEQ ID NO: 59991 - RNA, 30 nt, Synthetic Construct; identical to SEQ ID NO: 1079
  source 1..30: mol_type = other RNA

SEQ ID NO: 59992 - RNA, 21 nt, Synthetic Construct
  source 1..21: mol_type = other RNA
tcagtgcatcacagaactttg

SEQ ID NO: 59993 - RNA, 25 nt, Synthetic Construct
  source 1..25: mol_type = other RNA
atttccccttggggttgtaggacca

SEQ ID NO: 59994 - RNA, 25 nt, Synthetic Construct
  source 1..25: mol_type = other RNA
atttccccttggggttgtaggacca

SEQ ID NO: 59995 - RNA, 20 nt, Synthetic Construct
  source 1..20: mol_type = other RNA
cattgcacttgtctcggtct

SEQ ID NO: 59996 - RNA, 20 nt, Synthetic Construct
  source 1..20: mol_type = other RNA
cattgcacttgtctcggtct

SEQ ID NO: 59997 - RNA, 16 nt, Synthetic Construct
  source 1..16: mol_type = other RNA
ccatgccgcgtgcggg

SEQ ID NO: 59998 - RNA, 27 nt, Synthetic Construct
  source 1..27: mol_type = other RNA
ccccccactgctaaatctgactggctt

SEQ ID NO: 59999 - RNA, 27 nt, Synthetic Construct
  source 1..27: mol_type = other RNA
ccccccactgctaaatctgactggctt

SEQ ID NO: 60000 - RNA, 23 nt, Synthetic Construct
  source 1..23: mol_type = other RNA
tcttggagtaggtcattgggtgg

SEQ ID NO: 60001 - RNA, 23 nt, Synthetic Construct
  source 1..23: mol_type = other RNA
tgaggagcagagagcgagacttt

SEQ ID NO: 60002 - RNA, 23 nt, Synthetic Construct
  source 1..23: mol_type = other RNA
tccagtactgagctgccccgagt

SEQ ID NO: 60003 - RNA, 21 nt, Synthetic Construct
  source 1..21: mol_type = other RNA
tccttcattccaccggagtct

SEQ ID NO: 60004 - RNA, 23 nt, Synthetic Construct
  source 1..23: mol_type = other RNA
caacggaatcccaagagcagctg

SEQ ID NO: 60005 - RNA, 23 nt, Synthetic Construct
  source 1..23: mol_type = other RNA
caacggaatcccaagagcagctg

SEQ ID NO: 60006 - RNA, 22 nt, Synthetic Construct
  source 1..22: mol_type = other RNA
tcccactgcttcacttgactag

SEQ ID NO: 60007 - RNA, 22 nt, Synthetic Construct
  source 1..22: mol_type = other RNA
tcccactgcttcacttgactag

SEQ ID NO: 60008 - RNA, 21 nt, Synthetic Construct
  source 1..21: mol_type = other RNA
tgaggtagtaggctgtatagt

SEQ ID NO: 60009 - RNA, 22 nt, Synthetic Construct
  source 1..22: mol_type = other RNA
aatggcgccactagggttgtgt

SEQ ID NO: 60010 - RNA, 23 nt, Synthetic Construct
  source 1..23: mol_type = other RNA
tacagtactgtgataactgaagt

SEQ ID NO: 60011 - RNA, 23 nt, Synthetic Construct
  source 1..23: mol_type = other RNA
tacagtactgtgataactgaagt

SEQ ID NO: 60012 - RNA, 15 nt, Synthetic Construct
  source 1..15: mol_type = other RNA
tcgagtcgtcctgcg

SEQ ID NO: 60013 - RNA, 18 nt, Synthetic Construct
  source 1..18: mol_type = other RNA
caacggaatcccaaaagc

SEQ ID NO: 60014 - RNA, 18 nt, Synthetic Construct
  source 1..18: mol_type = other RNA
caacggaatcccaaaagc

SEQ ID NO: 60015 - RNA, 19 nt, Synthetic Construct
  source 1..19: mol_type = other RNA
tagcttatcagactgatgt

SEQ ID NO: 60016 - RNA, 19 nt, Synthetic Construct
  source 1..19: mol_type = other RNA
tagcttatcagactgatgt

SEQ ID NO: 60017 - RNA, 21 nt, Synthetic Construct
  source 1..21: mol_type = other RNA
tccctgagaccctaacttgtg

SEQ ID NO: 60018 - RNA, 21 nt, Synthetic Construct
  source 1..21: mol_type = other RNA
tccctgagaccctaacttgtg

SEQ ID NO: 60019 - RNA, 25 nt, Synthetic Construct
  source 1..25: mol_type = other RNA
ctgggaaccccgagtgacgtagtgt

SEQ ID NO: 60020 - RNA, 25 nt, Synthetic Construct
  source 1..25: mol_type = other RNA
ctgggaaccccgagtgacgtagtgt

SEQ ID NO: 60021 - RNA, 23 nt, Synthetic Construct
  source 1..23: mol_type = other RNA
actggctagggaaaatgattgga

SEQ ID NO: 60022 - RNA, 23 nt, Synthetic Construct
  source 1..23: mol_type = other RNA
actggctagggaaaatgattgga

SEQ ID NO: 60023 - RNA, 20 nt, Synthetic Construct
  source 1..20: mol_type = other RNA
tcctgtaccgatcaatagtg

SEQ ID NO: 60024 - RNA, 20 nt, Synthetic Construct
  source 1..20: mol_type = other RNA
tcctgtaccgatcaatagtg

SEQ ID NO: 60025 - RNA, 19 nt, Synthetic Construct
  source 1..19: mol_type = other RNA
tgtcaactggttgttggga

SEQ ID NO: 60026 - RNA, 22 nt, Synthetic Construct
  source 1..22: mol_type = other RNA
ggaggtagtaggttgtgtggtt

SEQ ID NO: 60027 - RNA, 22 nt, Synthetic Construct
  source 1..22: mol_type = other RNA
ggaggtagtaggttgtgtggtt

SEQ ID NO: 60028 - RNA, 21 nt, Synthetic Construct
  source 1..21: mol_type = other RNA
ggaggagttcgaaggtacgct

SEQ ID NO: 60029 - RNA, 21 nt, Synthetic Construct
  source 1..21: mol_type = other RNA
ggaggagttcgaaggtacgct

SEQ ID NO: 60030 - RNA, 17 nt, Synthetic Construct
  source 1..17: mol_type = other RNA
ccagtaaacggcggccg

SEQ ID NO: 60031 - RNA, 17 nt, Synthetic Construct
  source 1..17: mol_type = other RNA
ccagtaaacggcggccg

SEQ ID NO: 60032 - RNA, 28 nt, Synthetic Construct
  source 1..28: mol_type = other RNA
ggcagggttcgtgactggggtgaagtcg

SEQ ID NO: 60033 - RNA, 28 nt, Synthetic Construct
  source 1..28: mol_type = other RNA
ggcagggttcgtgactggggtgaagtcg

SEQ ID NO: 60034 - RNA, 21 nt, Synthetic Construct
  source 1..21: mol_type = other RNA
taactccttaagcgaattcgc

SEQ ID NO: 60035 - RNA, 21 nt, Synthetic Construct
  source 1..21: mol_type = other RNA
taactccttaagcgaattcgc

SEQ ID NO: 60036 - RNA, 22 nt, Synthetic Construct
  source 1..22: mol_type = other RNA
tgaggtagtagattgtacagtt

SEQ ID NO: 60037 - RNA, 22 nt, Synthetic Construct
  source 1..22: mol_type = other RNA
tgaggtagtagattgtacagtt

SEQ ID NO: 60038 - RNA, 23 nt, Synthetic Construct
  source 1..23: mol_type = other RNA
cagcccgtgttcggaagattttc

SEQ ID NO: 60039 - RNA, 23 nt, Synthetic Construct
  source 1..23: mol_type = other RNA
cagcccgtgttcggaagattttc

SEQ ID NO: 60040 - RNA, 22 nt, Synthetic Construct
  source 1..22: mol_type = other RNA
taaatccttaagcgaatctcgc

SEQ ID NO: 60041 - RNA, 23 nt, Synthetic Construct
  source 1..23: mol_type = other RNA
caaagtgctgttcgtgcaggtaa

SEQ ID NO: 60042 - RNA, 23 nt, Synthetic Construct
  source 1..23: mol_type = other RNA
caaagtgctgttcgtgcaggtaa

SEQ ID NO: 60043 - RNA, 23 nt, Synthetic Construct
  source 1..23: mol_type = other RNA
tggggtagtaggttgtgtggttt

SEQ ID NO: 60044 - RNA, 23 nt, Synthetic Construct
  source 1..23: mol_type = other RNA
tggggtagtaggttgtgtggttt

SEQ ID NO: 60045 - RNA, 22 nt, Synthetic Construct
  source 1..22: mol_type = other RNA
tgaggtagtagtttgtgccgtt

SEQ ID NO: 60046 - RNA, 21 nt, Synthetic Construct
  source 1..21: mol_type = other RNA
tgaggtagcagattgtatagt

SEQ ID NO: 60047 - RNA, 23 nt, Synthetic Construct
  source 1..23: mol_type = other RNA
caaagtgctgttcatgcaggtag

SEQ ID NO: 60048 - RNA, 16 nt, Synthetic Construct
  source 1..16: mol_type = other RNA
tggagtgtgacaatgg

SEQ ID NO: 60049 - RNA, 20 nt, Synthetic Construct
  source 1..20: mol_type = other RNA
agaggtagtaggttgtatag

SEQ ID NO: 60050 - RNA, 23 nt, Synthetic Construct
  source 1..23: mol_type = other RNA
tgaggtaggaggttgtatagttg

SEQ ID NO: 60051 - RNA, 23 nt, Synthetic Construct
  source 1..23: mol_type = other RNA
tcttggagtaggtcattgggtgt

SEQ ID NO: 60052 - RNA, 17 nt, Synthetic Construct
  source 1..17: mol_type = other RNA
ctaatgagactgccggt

SEQ ID NO: 60053 - RNA, 24 nt, Synthetic Construct
  source 1..24: mol_type = other RNA
tttccccttggggttgtaggacca

SEQ ID NO: 60054 - RNA, 21 nt, Synthetic Construct
  source 1..21: mol_type = other RNA
actcggcgtggcgtcggtcgt

SEQ ID NO: 60055 - RNA, 21 nt, Synthetic Construct
  source 1..21: mol_type = other RNA
actcggcgtggcgtcggtcgt

SEQ ID NO: 60056 - RNA, 16 nt, Synthetic Construct
  source 1..16: mol_type = other RNA
ggccgttcttagttgg

SEQ ID NO: 60057 - RNA, 16 nt, Synthetic Construct
  source 1..16: mol_type = other RNA
ggccgttcttagttgg

SEQ ID NO: 60058 - RNA, 23 nt, Synthetic Construct
  source 1..23: mol_type = other RNA
gaatgttgctcggtgaacccctt

SEQ ID NO: 60059 - RNA, 20 nt, Synthetic Construct
  source 1..20: mol_type = other RNA
agttctacagtccgacgatc

SEQ ID NO: 60060 - RNA, 20 nt, Synthetic Construct
  source 1..20: mol_type = other RNA
agttctacagtccgacgatc

SEQ ID NO: 60061 - RNA, 23 nt, Synthetic Construct
  source 1..23: mol_type = other RNA
ttatggtttgcctgggactgaaa

SEQ ID NO: 60062 - RNA, 23 nt, Synthetic Construct
  source 1..23: mol_type = other RNA
ttatggtttgcctgggactgaaa

SEQ ID NO: 60063 - RNA, 21 nt, Synthetic Construct
  source 1..21: mol_type = other RNA
agcagcattgtacagggctat

SEQ ID NO: 60064 - RNA, 21 nt, Synthetic Construct
  source 1..21: mol_type = other RNA
agcagcattgtacagggctat

SEQ ID NO: 60065 - RNA, 22 nt, Synthetic Construct
  source 1..22: mol_type = other RNA
cccagtgttcagactacctgtt

SEQ ID NO: 60066 - RNA, 22 nt, Synthetic Construct
  source 1..22: mol_type = other RNA
cccagtgttcagactacctgtt

SEQ ID NO: 60067 - RNA, 22 nt, Synthetic Construct
  source 1..22: mol_type = other RNA
ccccccactgctaaatttgact

SEQ ID NO: 60068 - RNA, 22 nt, Synthetic Construct
  source 1..22: mol_type = other RNA
ccccccactgctaaatttgact

SEQ ID NO: 60069 - RNA, 24 nt, Synthetic Construct
  source 1..24: mol_type = other RNA
tgtaaacatccccgactggaagcg

SEQ ID NO: 60070 - RNA, 16 nt, Synthetic Construct
  source 1..16: mol_type = other RNA
gtctacggccatacaa

SEQ ID NO: 60071 - RNA, 16 nt, Synthetic Construct
  source 1..16: mol_type = other RNA
gtctacggccatacaa

SEQ ID NO: 60072 - RNA, 22 nt, Synthetic Construct
  source 1..22: mol_type = other RNA
taccagcacgtaaatattggcg

SEQ ID NO: 60073 - RNA, 22 nt, Synthetic Construct
  source 1..22: mol_type = other RNA
taccagcacgtaaatattggcg

SEQ ID NO: 60074 - RNA, 22 nt, Synthetic Construct
  source 1..22: mol_type = other RNA
tggagtgtgacaatggtgtttt

SEQ ID NO: 60075 - RNA, 33 nt, Synthetic Construct; identical to SEQ ID NO: 7469
  source 1..33: mol_type = other RNA

SEQ ID NO: 60076 - RNA, 33 nt, Synthetic Construct; identical to SEQ ID NO: 7469
  source 1..33: mol_type = other RNA

SEQ ID NO: 60077 - RNA, 22 nt, Synthetic Construct
  source 1..22: mol_type = other RNA
tagcagcacgtaaatattggtg

SEQ ID NO: 60078 - RNA, 22 nt, Synthetic Construct
  source 1..22: mol_type = other RNA
tagcagcacgtaaatattggtg

SEQ ID NO: 60079 - RNA, 21 nt, Synthetic Construct
  source 1..21: mol_type = other RNA
tagcttatcagactgatgttg

SEQ ID NO: 60080 - RNA, 21 nt, Synthetic Construct
  source 1..21: mol_type = other RNA
tagcttatcagactgatgttg

SEQ ID NO: 60081 - RNA, 23 nt, Synthetic Construct
  source 1..23: mol_type = other RNA
tgaggggcagagagcgagactta

SEQ ID NO: 60082 - RNA, 23 nt, Synthetic Construct
  source 1..23: mol_type = other RNA
tgaggggcagagagcgagactta

SEQ ID NO: 60083 - RNA, 20 nt, Synthetic Construct
  source 1..20: mol_type = other RNA
agctacattgtctgctgggt

SEQ ID NO: 60084 - RNA, 20 nt, Synthetic Construct
  source 1..20: mol_type = other RNA
agctacattgtctgctgggt

SEQ ID NO: 60085 - RNA, 15 nt, Synthetic Construct
  source 1..15: mol_type = other RNA
ggagagatggctgag

SEQ ID NO: 60086 - RNA, 15 nt, Synthetic Construct
  source 1..15: mol_type = other RNA
ggagagatggctgag

SEQ ID NO: 60087 - RNA, 23 nt, Synthetic Construct
  source 1..23: mol_type = other RNA
tggtaatacgacgtacttagagt

SEQ ID NO: 60088 - RNA, 15 nt, Synthetic Construct
  source 1..15: mol_type = other RNA
agttgaccgcctggg

SEQ ID NO: 60089 - RNA, 15 nt, Synthetic Construct
  source 1..15: mol_type = other RNA
agttgaccgcctggg

SEQ ID NO: 60090 - RNA, 21 nt, Synthetic Construct
  source 1..21: mol_type = other RNA
agaggtagtaggttgtgtggt

SEQ ID NO: 60091 - RNA, 30 nt, Synthetic Construct; identical to SEQ ID NO: 1641
  source 1..30: mol_type = other RNA

SEQ ID NO: 60092 - RNA, 30 nt, Synthetic Construct; identical to SEQ ID NO: 1641
  source 1..30: mol_type = other RNA

SEQ ID NO: 60093 - RNA, 23 nt, Synthetic Construct
  source 1..23: mol_type = other RNA
gtgcagatcttggtggtagtagc

SEQ ID NO: 60094 - RNA, 23 nt, Synthetic Construct
  source 1..23: mol_type = other RNA
gtgcagatcttggtggtagtagc

SEQ ID NO: 60095 - RNA, 22 nt, Synthetic Construct
  source 1..22: mol_type = other RNA
tgagatagtagtttgtgctgtt

SEQ ID NO: 60096 - RNA, 40 nt, Synthetic Construct; identical to SEQ ID NO: 2684
  source 1..40: mol_type = other RNA

SEQ ID NO: 60097 - RNA, 40 nt, Synthetic Construct; identical to SEQ ID NO: 2684
  source 1..40: mol_type = other RNA

SEQ ID NO: 60098 - RNA, 22 nt, Synthetic Construct
  source 1..22: mol_type = other RNA
tacccattgcatatcggagttg

SEQ ID NO: 60099 - RNA, 22 nt, Synthetic Construct
  source 1..22: mol_type = other RNA
tacccattgcatatcggagttg

SEQ ID NO: 60100 - RNA, 22 nt, Synthetic Construct
  source 1..22: mol_type = other RNA
tggaatgtaaagaagtatgtaa

SEQ ID NO: 60101 - RNA, 22 nt, Synthetic Construct
  source 1..22: mol_type = other RNA
tggaatgtaaagaagtatgtaa

SEQ ID NO: 60102 - RNA, 27 nt, Synthetic Construct
  source 1..27: mol_type = other RNA
cgtgtgaaagtaggtcatcgtcaggct

SEQ ID NO: 60103 - RNA, 27 nt, Synthetic Construct
  source 1..27: mol_type = other RNA
cgtgtgaaagtaggtcatcgtcaggct

SEQ ID NO: 60104 - RNA, 20 nt, Synthetic Construct
  source 1..20: mol_type = other RNA
tagcagcacgtaaatattgg

SEQ ID NO: 60105 - RNA, 20 nt, Synthetic Construct
  source 1..20: mol_type = other RNA
tagcagcacgtaaatattgg

SEQ ID NO: 60106 - RNA, 24 nt, Synthetic Construct
  source 1..24: mol_type = other RNA
ttcaagtaatccaggataggcttt

SEQ ID NO: 60107 - RNA, 22 nt, Synthetic Construct
  source 1..22: mol_type = other RNA
tcgcaccgtgagtaataatgcg

SEQ ID NO: 60108 - RNA, 22 nt, Synthetic Construct
  source 1..22: mol_type = other RNA
tgaggtagtagtttgtgcggtt

SEQ ID NO: 60109 - RNA, 35 nt, Synthetic Construct; identical to SEQ ID NO: 2548
  source 1..35: mol_type = other RNA

SEQ ID NO: 60110 - RNA, 22 nt, Synthetic Construct
  source 1..22: mol_type = other RNA
acagtagtctgcacattggtta

SEQ ID NO: 60111 - RNA, 30 nt, Synthetic Construct; identical to SEQ ID NO: 768
  source 1..30: mol_type = other RNA

SEQ ID NO: 60112 - RNA, 16 nt, Synthetic Construct
  source 1..16: mol_type = other RNA
acggcgggagtaacta

SEQ ID NO: 60113 - RNA, 16 nt, Synthetic Construct
  source 1..16: mol_type = other RNA
acggcgggagtaacta

SEQ ID NO: 60114 - RNA, 22 nt, Synthetic Construct
  source 1..22: mol_type = other RNA
tgaggtagtagtatgtgctgtt

SEQ ID NO: 60115 - RNA, 22 nt, Synthetic Construct
  source 1..22: mol_type = other RNA
tgaggtagtagtatgtgctgtt

SEQ ID NO: 60116 - RNA, 23 nt, Synthetic Construct
  source 1..23: mol_type = other RNA
caaagagctgttcgtgcaggtag

SEQ ID NO: 60117 - RNA, 23 nt, Synthetic Construct
  source 1..23: mol_type = other RNA
caaagagctgttcgtgcaggtag

SEQ ID NO: 60118 - RNA, 24 nt, Synthetic Construct
  source 1..24: mol_type = other RNA
tgagaactgaattccatgggtttt

SEQ ID NO: 60119 - RNA, 24 nt, Synthetic Construct
  source 1..24: mol_type = other RNA
tgagaactgaattccatgggtttt

SEQ ID NO: 60120 - RNA, 34 nt, Synthetic Construct; identical to SEQ ID NO: 10079
  source 1..34: mol_type = other RNA

SEQ ID NO: 60121 - RNA, 34 nt, Synthetic Construct; identical to SEQ ID NO: 10079
  source 1..34: mol_type = other RNA

SEQ ID NO: 60122 - RNA, 20 nt, Synthetic Construct
  source 1..20: mol_type = other RNA
tcggaagaaggggtgcctgg

SEQ ID NO: 60123 - RNA, 20 nt, Synthetic Construct
  source 1..20: mol_type = other RNA
tcggaagaaggggtgcctgg

SEQ ID NO: 60124 - RNA, 17 nt, Synthetic Construct
  source 1..17: mol_type = other RNA
cacggcccagactccta

SEQ ID NO: 60125 - RNA, 17 nt, Synthetic Construct
  source 1..17: mol_type = other RNA
cacggcccagactccta

SEQ ID NO: 60126 - RNA, 25 nt, Synthetic Construct
  source 1..25: mol_type = other RNA
aacattcaacgctgtcggtgagttt

SEQ ID NO: 60127 - RNA, 25 nt, Synthetic Construct
  source 1..25: mol_type = other RNA
aacattcaacgctgtcggtgagttt

SEQ ID NO: 60128 - RNA, 22 nt, Synthetic Construct
  source 1..22: mol_type = other RNA
tgaggtagtaggatgtgtggtt

SEQ ID NO: 60129 - RNA, 22 nt, Synthetic Construct
  source 1..22: mol_type = other RNA
tattgcacttgtcccggtctgt

SEQ ID NO: 60130 - RNA, 22 nt, Synthetic Construct
  source 1..22: mol_type = other RNA
tattgcacttgtcccggtctgt

SEQ ID NO: 60131 - RNA, 21 nt, Synthetic Construct
  source 1..21: mol_type = other RNA
ctagactgaagccccttgagg

SEQ ID NO: 60132 - RNA, 22 nt, Synthetic Construct
  source 1..22: mol_type = other RNA
aggaatgtaaagaagtatgtat

SEQ ID NO: 60133 - RNA, 22 nt, Synthetic Construct
  source 1..22: mol_type = other RNA
aggaatgtaaagaagtatgtat

SEQ ID NO: 60134 - RNA, 22 nt, Synthetic Construct
  source 1..22: mol_type = other RNA
tcgtaccgtgagtaatgatgcg

SEQ ID NO: 60135 - RNA, 22 nt, Synthetic Construct
  source 1..22: mol_type = other RNA
tcgtaccgtgagtaatgatgcg

SEQ ID NO: 60136 - RNA, 22 nt, Synthetic Construct
  source 1..22: mol_type = other RNA
tgaggcagtagattgtatagtt

SEQ ID NO: 60137 - RNA, 22 nt, Synthetic Construct
  source 1..22: mol_type = other RNA
tgaggcagtagattgtatagtt

SEQ ID NO: 60138 - RNA, 23 nt, Synthetic Construct
  source 1..23: mol_type = other RNA
tcaagagcaataacgaaaaatgt

SEQ ID NO: 60139 - RNA, 23 nt, Synthetic Construct
  source 1..23: mol_type = other RNA
tcaagagcaataacgaaaaatgt

SEQ ID NO: 60140 - RNA, 27 nt, Synthetic Construct
  source 1..27: mol_type = other RNA
cccctcactgctaaatttgactggctt

SEQ ID NO: 60141 - RNA, 22 nt, Synthetic Construct
  source 1..22: mol_type = other RNA
tcctgtactgagctgccccgtg

SEQ ID NO: 60142 - RNA, 22 nt, Synthetic Construct
  source 1..22: mol_type = other RNA
tcctgtactgagctgccccgtg

SEQ ID NO: 60143 - RNA, 16 nt, Synthetic Construct
  source 1..16: mol_type = other RNA
cgtgagctgggtttag

SEQ ID NO: 60144 - RNA, 19 nt, Synthetic Construct
  source 1..19: mol_type = other RNA
tcagtagctcgaggaaaag

SEQ ID NO: 60145 - RNA, 20 nt, Synthetic Construct
  source 1..20: mol_type = other RNA
tgaggtagaaggttgtatag

SEQ ID NO: 60146 - RNA, 20 nt, Synthetic Construct
  source 1..20: mol_type = other RNA
tgaggtagaaggttgtatag

SEQ ID NO: 60147 - RNA, 22 nt, Synthetic Construct
  source 1..22: mol_type = other RNA
tgaggtagtagtctgtgctgtt

SEQ ID NO: 60148 - RNA, 23 nt, Synthetic Construct
  source 1..23: mol_type = other RNA
cagcggaatcccaaaagcagctg

SEQ ID NO: 60149 - RNA, 22 nt, Synthetic Construct
  source 1..22: mol_type = other RNA
tcaggctcagtcccctcccgat

SEQ ID NO: 60150 - RNA, 22 nt, Synthetic Construct
  source 1..22: mol_type = other RNA
tcaggctcagtcccctcccgat

SEQ ID NO: 60151 - RNA, 18 nt, Synthetic Construct
  source 1..18: mol_type = other RNA
atcccacttctgacacca

SEQ ID NO: 60152 - RNA, 18 nt, Synthetic Construct
  source 1..18: mol_type = other RNA
atcccacttctgacacca

SEQ ID NO: 60153 - RNA, 28 nt, Synthetic Construct
  source 1..28: mol_type = other RNA
tccctgtggtctagtggttaggattcgg

SEQ ID NO: 60154 - RNA, 28 nt, Synthetic Construct
  source 1..28: mol_type = other RNA
tccctgtggtctagtggttaggattcgg

SEQ ID NO: 60155 - RNA, 19 nt, Synthetic Construct
  source 1..19: mol_type = other RNA
caataacaggtctgtgatg

SEQ ID NO: 60156 - RNA, 19 nt, Synthetic Construct
  source 1..19: mol_type = other RNA
caataacaggtctgtgatg

SEQ ID NO: 60157 - RNA, 25 nt, Synthetic Construct
  source 1..25: mol_type = other RNA
ttgaggatatgaggtcgagacgaca

SEQ ID NO: 60158 - RNA, 25 nt, Synthetic Construct
  source 1..25: mol_type = other RNA
ttgaggatatgaggtcgagacgaca

SEQ ID NO: 60159 - RNA, 20 nt, Synthetic Construct
  source 1..20: mol_type = other RNA
ggaggtagtaggttgtgtgg

SEQ ID NO: 60160 - RNA, 21 nt, Synthetic Construct
  source 1..21: mol_type = other RNA
ctagactgaagccccttgagg

SEQ ID NO: 60161 - RNA, 21 nt, Synthetic Construct
  source 1..21: mol_type = other RNA
ctagactgaagccccttgagg

SEQ ID NO: 60162 - RNA, 29 nt, Synthetic Construct
  source 1..29: mol_type = other RNA
caacgctagacgaactgcatggaaaggca

SEQ ID NO: 60163 - RNA, 29 nt, Synthetic Construct
  source 1..29: mol_type = other RNA
caacgctagacgaactgcatggaaaggca

SEQ ID NO: 60164 - RNA, 20 nt, Synthetic Construct
  source 1..20: mol_type = other RNA
tcccgggtttcggcaccatt

SEQ ID NO: 60165 - RNA, 22 nt, Synthetic Construct
  source 1..22: mol_type = other RNA
tcctgtattgagctgccccgag

SEQ ID NO: 60166 - RNA, 23 nt, Synthetic Construct
  source 1..23: mol_type = other RNA
cctcgcgcgattggagcggccga

SEQ ID NO: 60167 - RNA, 23 nt, Synthetic Construct
  source 1..23: mol_type = other RNA
cctcgcgcgattggagcggccga

SEQ ID NO: 60168 - RNA, 25 nt, Synthetic Construct
  source 1..25: mol_type = other RNA
ttgaggatgtgagatcgagacgaca

SEQ ID NO: 60169 - RNA, 25 nt, Synthetic Construct
  source 1..25: mol_type = other RNA
ttgaggatgtgagatcgagacgaca

SEQ ID NO: 60170 - RNA, 22 nt, Synthetic Construct
  source 1..22: mol_type = other RNA
ttaatgctaatcgtgatagggg

SEQ ID NO: 60171 - RNA, 23 nt, Synthetic Construct
  source 1..23: mol_type = other RNA
aatgacacgatcactcccgttga

SEQ ID NO: 60172 - RNA, 16 nt, Synthetic Construct
  source 1..16: mol_type = other RNA
gtctacggccatacaa

SEQ ID NO: 60173 - RNA, 16 nt, Synthetic Construct
  source 1..16: mol_type = other RNA
gtctacggccatacaa

SEQ ID NO: 60174 - RNA, 24 nt, Synthetic Construct
  source 1..24: mol_type = other RNA
tcctgtactgagctgccccgagat

SEQ ID NO: 60175 - RNA, 22 nt, Synthetic Construct
  source 1..22: mol_type = other RNA
cagtgcaatgttaaaagggcat

SEQ ID NO: 60176 - RNA, 22 nt, Synthetic Construct
  source 1..22: mol_type = other RNA
tgatgtagtagattgtatagtt

SEQ ID NO: 60177 - RNA, 22 nt, Synthetic Construct
  source 1..22: mol_type = other RNA
tgatgtagtagattgtatagtt

SEQ ID NO: 60178 - RNA, 16 nt, Synthetic Construct
  source 1..16: mol_type = other RNA
gtctacagccatacca

SEQ ID NO: 60179 - RNA, 24 nt, Synthetic Construct
  source 1..24: mol_type = other RNA
atgacacgatcactcccgttgagt

SEQ ID NO: 60180 - RNA, 24 nt, Synthetic Construct
  source 1..24: mol_type = other RNA
atgacacgatcactcccgttgagt

SEQ ID NO: 60181 - RNA, 24 nt, Synthetic Construct
  source 1..24: mol_type = other RNA
aaaagctgggttgagagggcgaaa

SEQ ID NO: 60182 - RNA, 24 nt, Synthetic Construct
  source 1..24: mol_type = other RNA
aaaagctgggttgagagggcgaaa

SEQ ID NO: 60183 - RNA, 22 nt, Synthetic Construct
  source 1..22: mol_type = other RNA
tgaggtagtggattgtatagtt

SEQ ID NO: 60184 - RNA, 22 nt, Synthetic Construct
  source 1..22: mol_type = other RNA
tgaggtagtggattgtatagtt

SEQ ID NO: 60185 - RNA, 18 nt, Synthetic Construct
  source 1..18: mol_type = other RNA
agcagcattgtacagggc

SEQ ID NO: 60186 - RNA, 18 nt, Synthetic Construct
  source 1..18: mol_type = other RNA
agcagcattgtacagggc

SEQ ID NO: 60187 - RNA, 20 nt, Synthetic Construct
  source 1..20: mol_type = other RNA
tcctgtctgaatatgggggg

SEQ ID NO: 60188 - RNA, 20 nt, Synthetic Construct
  source 1..20: mol_type = other RNA
tcctgtctgaatatgggggg

SEQ ID NO: 60189 - RNA, 22 nt, Synthetic Construct
  source 1..22: mol_type = other RNA
ttgtaccgtgagtaataatgcg

SEQ ID NO: 60190 - RNA, 24 nt, Synthetic Construct
  source 1..24: mol_type = other RNA
gatgaggcgtgataacgagtctgc

SEQ ID NO: 60191 - RNA, 21 nt, Synthetic Construct
  source 1..21: mol_type = other RNA
cgtaccgtgagtagtaatgcg

SEQ ID NO: 60192 - RNA, 34 nt, Synthetic Construct; identical to SEQ ID NO: 6757
  source 1..34: mol_type = other RNA

SEQ ID NO: 60193 - RNA, 18 nt, Synthetic Construct
  source 1..18: mol_type = other RNA
gcaggacggtggccatgg

SEQ ID NO: 60194 - RNA, 18 nt, Synthetic Construct
  source 1..18: mol_type = other RNA
gcaggacggtggccatgg

SEQ ID NO: 60195 - RNA, 32 nt, Synthetic Construct; identical to SEQ ID NO: 2798
  source 1..32: mol_type = other RNA

SEQ ID NO: 60196 - RNA, 22 nt, Synthetic Construct
  source 1..22: mol_type = other RNA
cattgcacttgtctcggcctga

SEQ ID NO: 60197 - RNA, 31 nt, Synthetic Construct; identical to SEQ ID NO: 32560
  source 1..31: mol_type = other RNA

SEQ ID NO: 60198 - RNA, 31 nt, Synthetic Construct; identical to SEQ ID NO: 32560
  source 1..31: mol_type = other RNA

SEQ ID NO: 60199 - RNA, 22 nt, Synthetic Construct
  source 1..22: mol_type = other RNA
tgaggtagtagtttgtgctatt

SEQ ID NO: 60200 - RNA, 39 nt, Synthetic Construct; identical to SEQ ID NO: 2980
  source 1..39: mol_type = other RNA

SEQ ID NO: 60201 - RNA, 39 nt, Synthetic Construct; identical to SEQ ID NO: 2980
  source 1..39: mol_type = other RNA

SEQ ID NO: 60202 - RNA, 23 nt, Synthetic Construct
  source 1..23: mol_type = other RNA
caaagtgctgttcgtgcagatag

SEQ ID NO: 60203 - RNA, 23 nt, Synthetic Construct
  source 1..23: mol_type = other RNA
caaagtgctgtacgtgcaggtag

SEQ ID NO: 60204 - RNA, 23 nt, Synthetic Construct
  source 1..23: mol_type = other RNA
caaagtgctgtacgtgcaggtag

SEQ ID NO: 60205 - RNA, 21 nt, Synthetic Construct
  source 1..21: mol_type = other RNA
tgaggtagtaggttgcatagt

SEQ ID NO: 60206 - RNA, 39 nt, Synthetic Construct; identical to SEQ ID NO: 4939
  source 1..39: mol_type = other RNA

SEQ ID NO: 60207 - RNA, 39 nt, Synthetic Construct; identical to SEQ ID NO: 4939
  source 1..39: mol_type = other RNA

SEQ ID NO: 60208 - RNA, 24 nt, Synthetic Construct
  source 1..24: mol_type = other RNA
tgtaaacatccccgactggaagcc

SEQ ID NO: 60209 - RNA, 24 nt, Synthetic Construct
  source 1..24: mol_type = other RNA
tgtaaacatccccgactggaagcc

SEQ ID NO: 60210 - RNA, 18 nt, Synthetic Construct
  source 1..18: mol_type = other RNA
cagcactctgcaaagacg

SEQ ID NO: 60211 - RNA, 18 nt, Synthetic Construct
  source 1..18: mol_type = other RNA
cgccgatgatagtgcgga

SEQ ID NO: 60212 - RNA, 22 nt, Synthetic Construct
  source 1..22: mol_type = other RNA
taactccttaagcggatctcgc

SEQ ID NO: 60213 - RNA, 22 nt, Synthetic Construct
  source 1..22: mol_type = other RNA
taactccttaagcggatctcgc

SEQ ID NO: 60214 - RNA, 20 nt, Synthetic Construct
  source 1..20: mol_type = other RNA
tccccggcatctccaccaaa

SEQ ID NO: 60215 - RNA, 20 nt, Synthetic Construct
  source 1..20: mol_type = other RNA
tccccggcatctccaccaaa

SEQ ID NO: 60216 - RNA, 24 nt, Synthetic Construct
  source 1..24: mol_type = other RNA
gcgagagtaggacgttgccaggtt

SEQ ID NO: 60217 - RNA, 24 nt, Synthetic Construct
  source 1..24: mol_type = other RNA
gcgagagtaggacgttgccaggtt

SEQ ID NO: 60218 - RNA, 22 nt, Synthetic Construct
  source 1..22: mol_type = other RNA
tcgaatcccatcctcgtcgcca

SEQ ID NO: 60219 - RNA, 22 nt, Synthetic Construct
  source 1..22: mol_type = other RNA
tcgaatcccatcctcgtcgcca

SEQ ID NO: 60220 - RNA, 16 nt, Synthetic Construct
  source 1..16: mol_type = other RNA
aggtcatcgtcaggct

SEQ ID NO: 60221 - RNA, 16 nt, Synthetic Construct
  source 1..16: mol_type = other RNA
aggtcatcgtcaggct

SEQ ID NO: 60222 - RNA, 23 nt, Synthetic Construct
  source 1..23: mol_type = other RNA
atgtcccacccccactcctgttt

SEQ ID NO: 60223 - RNA, 23 nt, Synthetic Construct
  source 1..23: mol_type = other RNA
atgtcccacccccactcctgttt

SEQ ID NO: 60224 - RNA, 19 nt, Synthetic Construct
  source 1..19: mol_type = other RNA
atccctgcggcgtctccat

SEQ ID NO: 60225 - RNA, 22 nt, Synthetic Construct
  source 1..22: mol_type = other RNA
tagcttatcagactgatgttgg

SEQ ID NO: 60226 - RNA, 22 nt, Synthetic Construct
  source 1..22: mol_type = other RNA
tagcagcacgtaaacattggcg

SEQ ID NO: 60227 - RNA, 22 nt, Synthetic Construct
  source 1..22: mol_type = other RNA
tagcagcacgtaaacattggcg

SEQ ID NO: 60228 - RNA, 21 nt, Synthetic Construct
  source 1..21: mol_type = other RNA
tcctgtactgagctgcccgag

SEQ ID NO: 60229 - RNA, 21 nt, Synthetic Construct
  source 1..21: mol_type = other RNA
tgaagtagtaggttgtatagt

SEQ ID NO: 60230 - RNA, 21 nt, Synthetic Construct
  source 1..21: mol_type = other RNA
tgaagtagtaggttgtatagt

SEQ ID NO: 60231 - RNA, 18 nt, Synthetic Construct
  source 1..18: mol_type = other RNA
cattcttgcgacccgggt

SEQ ID NO: 60232 - RNA, 18 nt, Synthetic Construct
  source 1..18: mol_type = other RNA
cattcttgcgacccgggt

SEQ ID NO: 60233 - RNA, 23 nt, Synthetic Construct
  source 1..23: mol_type = other RNA
caaagtgctgttcgcgcaggtag

SEQ ID NO: 60234 - RNA, 24 nt, Synthetic Construct
  source 1..24: mol_type = other RNA
gatgaggcgtgataacgagtctgc

SEQ ID NO: 60235 - RNA, 22 nt, Synthetic Construct
  source 1..22: mol_type = other RNA
cggctctgggtctgtggggagt

SEQ ID NO: 60236 - RNA, 18 nt, Synthetic Construct
  source 1..18: mol_type = other RNA
ggtagcgtggccgagcgg

SEQ ID NO: 60237 - RNA, 17 nt, Synthetic Construct
  source 1..17: mol_type = other RNA
tggccgtcgtcagctcg

SEQ ID NO: 60238 - RNA, 17 nt, Synthetic Construct
  source 1..17: mol_type = other RNA
tctacagtccgacgatc

SEQ ID NO: 60239 - RNA, 17 nt, Synthetic Construct
  source 1..17: mol_type = other RNA
tctacagtccgacgatc

SEQ ID NO: 60240 - RNA, 29 nt, Synthetic Construct
  source 1..29: mol_type = other RNA
ccccccccactgctaaatttgactggctt

SEQ ID NO: 60241 - RNA, 22 nt, Synthetic Construct
  source 1..22: mol_type = other RNA
tagcagcgcgtaaatattggcg

SEQ ID NO: 60242 - RNA, 22 nt, Synthetic Construct
  source 1..22: mol_type = other RNA
tagcagcgcgtaaatattggcg

SEQ ID NO: 60243 - RNA, 25 nt, Synthetic Construct
  source 1..25: mol_type = other RNA
tcccacatggtctagcggttaggat

SEQ ID NO: 60244 - RNA, 27 nt, Synthetic Construct
  source 1..27: mol_type = other RNA
gcgggtgatgcgaactggagtctgagc

SEQ ID NO: 60245 - RNA, 27 nt, Synthetic Construct
  source 1..27: mol_type = other RNA
gcgggtgatgcgaactggagtctgagc

SEQ ID NO: 60246 - RNA, 23 nt, Synthetic Construct
  source 1..23: mol_type = other RNA
tcgaggagctcacagtctagtaa

SEQ ID NO: 60247 - RNA, 23 nt, Synthetic Construct
  source 1..23: mol_type = other RNA
tcgaggagctcacagtctagtaa

SEQ ID NO: 60248 - RNA, 21 nt, Synthetic Construct
  source 1..21: mol_type = other RNA
tgaggtagtagattgtatggt

SEQ ID NO: 60249 - RNA, 21 nt, Synthetic Construct
  source 1..21: mol_type = other RNA
tgaggtagtagattgtatggt

SEQ ID NO: 60250 - RNA, 34 nt, Synthetic Construct; identical to SEQ ID NO: 749
  source 1..34: mol_type = other RNA

SEQ ID NO: 60251 - RNA, 34 nt, Synthetic Construct; identical to SEQ ID NO: 749
  source 1..34: mol_type = other RNA

SEQ ID NO: 60252 - RNA, 21 nt, Synthetic Construct
  source 1..21: mol_type = other RNA
atgtcccacccccactcctgt

SEQ ID NO: 60253 - RNA, 19 nt, Synthetic Construct
  source 1..19: mol_type = other RNA
accgggtgctgtaggcttt

SEQ ID NO: 60254 - RNA, 19 nt, Synthetic Construct
  source 1..19: mol_type = other RNA
accgggtgctgtaggcttt

SEQ ID NO: 60255 - RNA, 23 nt, Synthetic Construct
  source 1..23: mol_type = other RNA
caaagtgcttacagtgcaggtag

SEQ ID NO: 60256 - RNA, 23 nt, Synthetic Construct
  source 1..23: mol_type = other RNA
caaagtgcttacagtgcaggtag

SEQ ID NO: 60257 - RNA, 23 nt, Synthetic Construct
  source 1..23: mol_type = other RNA
tcctgtactgagccgccccgagt

SEQ ID NO: 60258 - RNA, 34 nt, Synthetic Construct; identical to SEQ ID NO: 13733
  source 1..34: mol_type = other RNA

SEQ ID NO: 60259 - RNA, 34 nt, Synthetic Construct; identical to SEQ ID NO: 13733
  source 1..34: mol_type = other RNA

SEQ ID NO: 60260 - RNA, 21 nt, Synthetic Construct
  source 1..21: mol_type = other RNA
tggggtagtagattgtatagt

SEQ ID NO: 60261 - RNA, 20 nt, Synthetic Construct
  source 1..20: mol_type = other RNA
agttctacagtccgacgatc

SEQ ID NO: 60262 - RNA, 20 nt, Synthetic Construct
  source 1..20: mol_type = other RNA
agttctacagtccgacgatc

SEQ ID NO: 60263 - RNA, 23 nt, Synthetic Construct
  source 1..23: mol_type = other RNA
tccagtactgagctgccccgaga

SEQ ID NO: 60264 - RNA, 22 nt, Synthetic Construct
  source 1..22: mol_type = other RNA
tgaggtagtaggctgtatagtt

SEQ ID NO: 60265 - RNA, 23 nt, Synthetic Construct
  source 1..23: mol_type = other RNA
tgacctatgaattgacagccaga

SEQ ID NO: 60266 - RNA, 23 nt, Synthetic Construct
  source 1..23: mol_type = other RNA
tgacctatgaattgacagccaga

SEQ ID NO: 60267 - RNA, 33 nt, Synthetic Construct; identical to SEQ ID NO: 2479
  source 1..33: mol_type = other RNA

SEQ ID NO: 60268 - RNA, 33 nt, Synthetic Construct; identical to SEQ ID NO: 2479
  source 1..33: mol_type = other RNA

SEQ ID NO: 60269 - RNA, 24 nt, Synthetic Construct
  source 1..24: mol_type = other RNA
tgaggtagtaggttgtgtggtttt

SEQ ID NO: 60270 - RNA, 24 nt, Synthetic Construct
  source 1..24: mol_type = other RNA
tgaggtagtaggttgtgtggtttt

SEQ ID NO: 60271 - RNA, 27 nt, Synthetic Construct
  source 1..27: mol_type = other RNA
ccccccactgctaaattcgactggctt

SEQ ID NO: 60272 - RNA, 27 nt, Synthetic Construct
  source 1..27: mol_type = other RNA
ccccccactgctaaattcgactggctt

SEQ ID NO: 60273 - RNA, 22 nt, Synthetic Construct
  source 1..22: mol_type = other RNA
tgaggtagtagtttgtgttgtt

SEQ ID NO: 60274 - RNA, 21 nt, Synthetic Construct
  source 1..21: mol_type = other RNA
ctggactgaagctccttgagg

SEQ ID NO: 60275 - RNA, 22 nt, Synthetic Construct
  source 1..22: mol_type = other RNA
gtcagtttgtcaaataccccat

SEQ ID NO: 60276 - RNA, 22 nt, Synthetic Construct
  source 1..22: mol_type = other RNA
ccgtaccgtgagtaataatgcg

SEQ ID NO: 60277 - RNA, 21 nt, Synthetic Construct
  source 1..21: mol_type = other RNA
aaaagctgggttgagagggcg

SEQ ID NO: 60278 - RNA, 21 nt, Synthetic Construct
  source 1..21: mol_type = other RNA
aaaagctgggttgagagggcg

SEQ ID NO: 60279 - RNA, 22 nt, Synthetic Construct
  source 1..22: mol_type = other RNA
tgaggtagtagtttgtgctgtt

SEQ ID NO: 60280 - RNA, 36 nt, Synthetic Construct; identical to SEQ ID NO: 11035
  source 1..36: mol_type = other RNA

SEQ ID NO: 60281 - RNA, 23 nt, Synthetic Construct
  source 1..23: mol_type = other RNA
caaagtgctgttcgtgtaggtag

SEQ ID NO: 60282 - RNA, 25 nt, Synthetic Construct
  source 1..25: mol_type = other RNA
tgaggtagtaggttgtgtggttttt

SEQ ID NO: 60283 - RNA, 25 nt, Synthetic Construct
  source 1..25: mol_type = other RNA
tgaggtagtaggttgtgtggttttt

SEQ ID NO: 60284 - RNA, 19 nt, Synthetic Construct
  source 1..19: mol_type = other RNA
tccccggcatctccaccat

SEQ ID NO: 60285 - RNA, 19 nt, Synthetic Construct
  source 1..19: mol_type = other RNA
tccccggcatctccaccat

SEQ ID NO: 60286 - RNA, 35 nt, Synthetic Construct; identical to SEQ ID NO: 1160
  source 1..35: mol_type = other RNA

SEQ ID NO: 60287 - RNA, 35 nt, Synthetic Construct; identical to SEQ ID NO: 1160
  source 1..35: mol_type = other RNA

SEQ ID NO: 60288 - RNA, 20 nt, Synthetic Construct
  source 1..20: mol_type = other RNA
tagcagcacataatggtttg

SEQ ID NO: 60289 - RNA, 20 nt, Synthetic Construct
  source 1..20: mol_type = other RNA
tagcagcacataatggtttg

SEQ ID NO: 60290 - RNA, 20 nt, Synthetic Construct
  source 1..20: mol_type = other RNA
agaggtagtaggttgtgtgg

SEQ ID NO: 60291 - RNA, 20 nt, Synthetic Construct
  source 1..20: mol_type = other RNA
agaggtagtaggttgtgtgg

SEQ ID NO: 60292 - RNA, 24 nt, Synthetic Construct
  source 1..24: mol_type = other RNA
ttgcagctgcctgggagtgacttc

SEQ ID NO: 60293 - RNA, 24 nt, Synthetic Construct
  source 1..24: mol_type = other RNA
ttgcagctgcctgggagtgacttc

SEQ ID NO: 60294 - RNA, 19 nt, Synthetic Construct
  source 1..19: mol_type = other RNA
tggagtgtgacaatggtgt

SEQ ID NO: 60295 - RNA, 19 nt, Synthetic Construct
  source 1..19: mol_type = other RNA
ggtggggagtttggctggg

SEQ ID NO: 60296 - RNA, 19 nt, Synthetic Construct
  source 1..19: mol_type = other RNA
ggtggggagtttggctggg

SEQ ID NO: 60297 - RNA, 22 nt, Synthetic Construct
  source 1..22: mol_type = other RNA
tgaggtagtagggtgtatagtt

SEQ ID NO: 60298 - RNA, 22 nt, Synthetic Construct
  source 1..22: mol_type = other RNA
tgaggtagtagggtgtatagtt

SEQ ID NO: 60299 - RNA, 21 nt, Synthetic Construct
  source 1..21: mol_type = other RNA
cgtaccgtgagtaataatgcg

SEQ ID NO: 60300 - RNA, 34 nt, Synthetic Construct; identical to SEQ ID NO: 2529
  source 1..34: mol_type = other RNA

SEQ ID NO: 60301 - RNA, 15 nt, Synthetic Construct
  source 1..15: mol_type = other RNA
tcctgacggccatag

SEQ ID NO: 60302 - RNA, 22 nt, Synthetic Construct
  source 1..22: mol_type = other RNA
tcactgatcgagtcgtcctgcg

SEQ ID NO: 60303 - RNA, 22 nt, Synthetic Construct
  source 1..22: mol_type = other RNA
tcactgatcgagtcgtcctgcg

SEQ ID NO: 60304 - RNA, 29 nt, Synthetic Construct
  source 1..29: mol_type = other RNA
gcccggctagctcagtcggtagagcatgg

SEQ ID NO: 60305 - RNA, 29 nt, Synthetic Construct
  source 1..29: mol_type = other RNA
gcccggctagctcagtcggtagagcatgg

SEQ ID NO: 60306 - RNA, 22 nt, Synthetic Construct
  source 1..22: mol_type = other RNA
tgaggtagtagtttgtgctgta

SEQ ID NO: 60307 - RNA, 22 nt, Synthetic Construct
  source 1..22: mol_type = other RNA
tgaggtagtagtttgtgctgta

SEQ ID NO: 60308 - RNA, 16 nt, Synthetic Construct
  source 1..16: mol_type = other RNA
ttggcctcaagtcagg

SEQ ID NO: 60309 - RNA, 16 nt, Synthetic Construct
  source 1..16: mol_type = other RNA
ttggcctcaagtcagg

SEQ ID NO: 60310 - RNA, 22 nt, Synthetic Construct
  source 1..22: mol_type = other RNA
cattgcacttgtctcggtctgg

SEQ ID NO: 60311 - RNA, 22 nt, Synthetic Construct
  source 1..22: mol_type = other RNA
ctacgcctgtctgagcgtcgct

SEQ ID NO: 60312 - RNA, 22 nt, Synthetic Construct
  source 1..22: mol_type = other RNA
ctacgcctgtctgagcgtcgct

SEQ ID NO: 60313 - RNA, 17 nt, Synthetic Construct
  source 1..17: mol_type = other RNA
gaagttgaccgcctggg

SEQ ID NO: 60314 - RNA, 22 nt, Synthetic Construct
  source 1..22: mol_type = other RNA
tcgtatcgtgagtaataatgcg

SEQ ID NO: 60315 - RNA, 23 nt, Synthetic Construct
  source 1..23: mol_type = other RNA
cctccctcgggagggcgcgcggg

SEQ ID NO: 60316 - RNA, 23 nt, Synthetic Construct
  source 1..23: mol_type = other RNA
cctccctcgggagggcgcgcggg

SEQ ID NO: 60317 - RNA, 18 nt, Synthetic Construct
  source 1..18: mol_type = other RNA
gcgaaattccttgtcggg

SEQ ID NO: 60318 - RNA, 23 nt, Synthetic Construct
  source 1..23: mol_type = other RNA
cccagtgttcagactacctgttc

SEQ ID NO: 60319 - RNA, 23 nt, Synthetic Construct
  source 1..23: mol_type = other RNA
cccagtgttcagactacctgttc

SEQ ID NO: 60320 - RNA, 23 nt, Synthetic Construct
  source 1..23: mol_type = other RNA
tccccttggggttgtaggaccac

SEQ ID NO: 60321 - RNA, 23 nt, Synthetic Construct
  source 1..23: mol_type = other RNA
tccccttggggttgtaggaccac

SEQ ID NO: 60322 - RNA, 16 nt, Synthetic Construct
  source 1..16: mol_type = other RNA
gctattgacgaccgta

SEQ ID NO: 60323 - RNA, 16 nt, Synthetic Construct
  source 1..16: mol_type = other RNA
gctattgacgaccgta

SEQ ID NO: 60324 - RNA, 37 nt, Synthetic Construct; identical to SEQ ID NO: 2482
  source 1..37: mol_type = other RNA

SEQ ID NO: 60325 - RNA, 37 nt, Synthetic Construct; identical to SEQ ID NO: 2482
  source 1..37: mol_type = other RNA

SEQ ID NO: 60326 - RNA, 23 nt, Synthetic Construct
  source 1..23: mol_type = other RNA
agctcggtctgaggcccctcaga

SEQ ID NO: 60327 - RNA, 23 nt, Synthetic Construct
  source 1..23: mol_type = other RNA
agctcggtctgaggcccctcaga

SEQ ID NO: 60328 - RNA, 25 nt, Synthetic Construct
  source 1..25: mol_type = other RNA
gtgaggatatgagatcgagacgaca

SEQ ID NO: 60329 - RNA, 16 nt, Synthetic Construct
  source 1..16: mol_type = other RNA
cccctggacctgtact

SEQ ID NO: 60330 - RNA, 16 nt, Synthetic Construct
  source 1..16: mol_type = other RNA
cccctggacctgtact

SEQ ID NO: 60331 - RNA, 20 nt, Synthetic Construct
  source 1..20: mol_type = other RNA
tgaggtagtaggctgtgtgg

SEQ ID NO: 60332 - RNA, 34 nt, Synthetic Construct; identical to SEQ ID NO: 11269
  source 1..34: mol_type = other RNA

SEQ ID NO: 60333 - RNA, 34 nt, Synthetic Construct; identical to SEQ ID NO: 11269
  source 1..34: mol_type = other RNA

SEQ ID NO: 60334 - RNA, 21 nt, Synthetic Construct
  source 1..21: mol_type = other RNA
cggggcagctcagtacaggat

SEQ ID NO: 60335 - RNA, 21 nt, Synthetic Construct
  source 1..21: mol_type = other RNA
cggggcagctcagtacaggat

SEQ ID NO: 60336 - RNA, 21 nt, Synthetic Construct
  source 1..21: mol_type = other RNA
cattattacttttggtacgcg

SEQ ID NO: 60337 - RNA, 15 nt, Synthetic Construct
  source 1..15: mol_type = other RNA
accggaggaaggtgg

SEQ ID NO: 60338 - RNA, 15 nt, Synthetic Construct
  source 1..15: mol_type = other RNA
accggaggaaggtgg

SEQ ID NO: 60339 - RNA, 28 nt, Synthetic Construct
  source 1..28: mol_type = other RNA
ccccccgctgctaaatttgactggcttt

SEQ ID NO: 60340 - RNA, 28 nt, Synthetic Construct
  source 1..28: mol_type = other RNA
ccccccgctgctaaatttgactggcttt

SEQ ID NO: 60341 - RNA, 20 nt, Synthetic Construct
  source 1..20: mol_type = other RNA
agcagcattgtacagggcta

SEQ ID NO: 60342 - RNA, 20 nt, Synthetic Construct
  source 1..20: mol_type = other RNA
agcagcattgtacagggcta

SEQ ID NO: 60343 - RNA, 18 nt, Synthetic Construct
  source 1..18: mol_type = other RNA
cattgcacttgtctcggt

SEQ ID NO: 60344 - RNA, 18 nt, Synthetic Construct
  source 1..18: mol_type = other RNA
cattgcacttgtctcggt

SEQ ID NO: 60345 - RNA, 39 nt, Synthetic Construct; identical to SEQ ID NO: 759
  source 1..39: mol_type = other RNA

SEQ ID NO: 60346 - RNA, 39 nt, Synthetic Construct; identical to SEQ ID NO: 759
  source 1..39: mol_type = other RNA

SEQ ID NO: 60347 - RNA, 21 nt, Synthetic Construct
  source 1..21: mol_type = other RNA
tgaggtagtgggttgtatagt

SEQ ID NO: 60348 - RNA, 22 nt, Synthetic Construct
  source 1..22: mol_type = other RNA
tgaggtagtaggtcgtatagtt

SEQ ID NO: 60349 - RNA, 22 nt, Synthetic Construct
  source 1..22: mol_type = other RNA
tgaggtagtaggtcgtatagtt

SEQ ID NO: 60350 - RNA, 21 nt, Synthetic Construct
  source 1..21: mol_type = other RNA
agcagcattgtacagggctat

SEQ ID NO: 60351 - RNA, 16 nt, Synthetic Construct
  source 1..16: mol_type = other RNA
gtctacggacatacca

SEQ ID NO: 60352 - RNA, 38 nt, Synthetic Construct; identical to SEQ ID NO: 2492
  source 1..38: mol_type = other RNA

SEQ ID NO: 60353 - RNA, 21 nt, Synthetic Construct
  source 1..21: mol_type = other RNA
acctgtactgagctgccccga

SEQ ID NO: 60354 - RNA, 21 nt, Synthetic Construct
  source 1..21: mol_type = other RNA
acctgtactgagctgccccga

SEQ ID NO: 60355 - RNA, 22 nt, Synthetic Construct
  source 1..22: mol_type = other RNA
ttaatgctaatcgtgatagggg

SEQ ID NO: 60356 - RNA, 22 nt, Synthetic Construct
  source 1..22: mol_type = other RNA
tgtgactggttgaccagagggg

SEQ ID NO: 60357 - RNA, 18 nt, Synthetic Construct
  source 1..18: mol_type = other RNA
gctgtgatggccgagtgg

SEQ ID NO: 60358 - RNA, 22 nt, Synthetic Construct
  source 1..22: mol_type = other RNA
tgaggtagtagattgtgctgtt

SEQ ID NO: 60359 - RNA, 21 nt, Synthetic Construct
  source 1..21: mol_type = other RNA
tgaggtagtaggttgcatagt

SEQ ID NO: 60360 - RNA, 22 nt, Synthetic Construct
  source 1..22: mol_type = other RNA
cattgcacttgtctcggcctga

SEQ ID NO: 60361 - RNA, 22 nt, Synthetic Construct
  source 1..22: mol_type = other RNA
cattgcacttgtctcggcctga

SEQ ID NO: 60362 - RNA, 22 nt, Synthetic Construct
  source 1..22: mol_type = other RNA
tcgtatcgtgagtaataatgcg

SEQ ID NO: 60363 - RNA, 22 nt, Synthetic Construct
  source 1..22: mol_type = other RNA
tcgtatcgtgagtaataatgcg

SEQ ID NO: 60364 - RNA, 33 nt, Synthetic Construct; identical to SEQ ID NO: 35121
  source 1..33: mol_type = other RNA

SEQ ID NO: 60365 - RNA, 33 nt, Synthetic Construct; identical to SEQ ID NO: 35121
  source 1..33: mol_type = other RNA

SEQ ID NO: 60366 - RNA, 44 nt, Synthetic Construct; identical to SEQ ID NO: 6685
  source 1..44: mol_type = other RNA

SEQ ID NO: 60367 - RNA, 44 nt, Synthetic Construct; identical to SEQ ID NO: 6685
  source 1..44: mol_type = other RNA

SEQ ID NO: 60368 - RNA, 20 nt, Synthetic Construct
  source 1..20: mol_type = other RNA
tgaggtagtaggttatgtgg

SEQ ID NO: 60369 - RNA, 22 nt, Synthetic Construct
  source 1..22: mol_type = other RNA
tgaggtaataggttgtgtggtt

SEQ ID NO: 60370 - RNA, 18 nt, Synthetic Construct
  source 1..18: mol_type = other RNA
atcgctagtaatcgcgga

SEQ ID NO: 60371 - RNA, 23 nt, Synthetic Construct
  source 1..23: mol_type = other RNA
taactccttaagcgaatctcggc

SEQ ID NO: 60372 - RNA, 23 nt, Synthetic Construct
  source 1..23: mol_type = other RNA
taactccttaagcgaatctcggc

SEQ ID NO: 60373 - RNA, 21 nt, Synthetic Construct
  source 1..21: mol_type = other RNA
tgtgactggttgaccagaggg

SEQ ID NO: 60374 - RNA, 20 nt, Synthetic Construct
  source 1..20: mol_type = other RNA
tgtcagtttgtcaaataccc

SEQ ID NO: 60375 - RNA, 36 nt, Synthetic Construct; identical to SEQ ID NO: 8838
  source 1..36: mol_type = other RNA

SEQ ID NO: 60376 - RNA, 36 nt, Synthetic Construct; identical to SEQ ID NO: 8838
  source 1..36: mol_type = other RNA

SEQ ID NO: 60377 - RNA, 21 nt, Synthetic Construct
  source 1..21: mol_type = other RNA
cgtaccgcgagtaataatgcg

SEQ ID NO: 60378 - RNA, 18 nt, Synthetic Construct
  source 1..18: mol_type = other RNA
ctaatgagactgccggtg

SEQ ID NO: 60379 - RNA, 18 nt, Synthetic Construct
  source 1..18: mol_type = other RNA
ctaatgagactgccggtg

SEQ ID NO: 60380 - RNA, 22 nt, Synthetic Construct
  source 1..22: mol_type = other RNA
tgaggtggtaggttgtatagtt

SEQ ID NO: 60381 - RNA, 22 nt, Synthetic Construct
  source 1..22: mol_type = other RNA
tgaggtggtaggttgtatagtt

SEQ ID NO: 60382 - RNA, 22 nt, Synthetic Construct
  source 1..22: mol_type = other RNA
tgaggcagtaggttgtatagtt

SEQ ID NO: 60383 - RNA, 22 nt, Synthetic Construct
  source 1..22: mol_type = other RNA
tgaggtagtagtttgtggtgtt

SEQ ID NO: 60384 - RNA, 22 nt, Synthetic Construct
  source 1..22: mol_type = other RNA
tgaggtagtagtttgtggtgtt

SEQ ID NO: 60385 - RNA, 22 nt, Synthetic Construct
  source 1..22: mol_type = other RNA
tggagtgtgacaatggtgcttg

SEQ ID NO: 60386 - RNA, 22 nt, Synthetic Construct
  source 1..22: mol_type = other RNA
tagcagcacgtaaatattgacg

SEQ ID NO: 60387 - RNA, 22 nt, Synthetic Construct
  source 1..22: mol_type = other RNA
tagcagcacgtaaatattgacg

SEQ ID NO: 60388 - RNA, 21 nt, Synthetic Construct
  source 1..21: mol_type = other RNA
tgaggaagtaggttgtatagt

SEQ ID NO: 60389 - RNA, 22 nt, Synthetic Construct
  source 1..22: mol_type = other RNA
tcgtaccgtgagcaataatgcg

SEQ ID NO: 60390 - RNA, 25 nt, Synthetic Construct
  source 1..25: mol_type = other RNA
cctcgcgcgattggagcggccgata

SEQ ID NO: 60391 - RNA, 15 nt, Synthetic Construct
  source 1..15: mol_type = other RNA
gcaagccgaacggta

SEQ ID NO: 60392 - RNA, 15 nt, Synthetic Construct
  source 1..15: mol_type = other RNA
gcaagccgaacggta

SEQ ID NO: 60393 - RNA, 22 nt, Synthetic Construct
  source 1..22: mol_type = other RNA
tgaggtagtagtttgtgctatt

SEQ ID NO: 60394 - RNA, 22 nt, Synthetic Construct
  source 1..22: mol_type = other RNA
tgaggtagtagtttgtgctatt

SEQ ID NO: 60395 - RNA, 24 nt, Synthetic Construct
  source 1..24: mol_type = other RNA
aggaagccctggaggggctggagg

SEQ ID NO: 60396 - RNA, 24 nt, Synthetic Construct
  source 1..24: mol_type = other RNA
aggaagccctggaggggctggagg

SEQ ID NO: 60397 - RNA, 22 nt, Synthetic Construct
  source 1..22: mol_type = other RNA
ncctgtactgagctgccccgag

SEQ ID NO: 60398 - RNA, 22 nt, Synthetic Construct
  source 1..22: mol_type = other RNA
ncctgtactgagctgccccgag

SEQ ID NO: 60399 - RNA, 20 nt, Synthetic Construct
  source 1..20: mol_type = other RNA
cgaggtagtaggttgtatag

SEQ ID NO: 60400 - RNA, 18 nt, Synthetic Construct
  source 1..18: mol_type = other RNA
cccaaaggtcgtcggttc

SEQ ID NO: 60401 - RNA, 23 nt, Synthetic Construct
  source 1..23: mol_type = other RNA
cctccctcgggagggcgcgcggg

SEQ ID NO: 60402 - RNA, 23 nt, Synthetic Construct
  source 1..23: mol_type = other RNA
cctccctcgggagggcgcgcggg

SEQ ID NO: 60403 - RNA, 23 nt, Synthetic Construct
  source 1..23: mol_type = other RNA
agaggtagtaggttgtgtggttt

SEQ ID NO: 60404 - RNA, 24 nt, Synthetic Construct
  source 1..24: mol_type = other RNA
tcctgtactgagctgccccgagat

SEQ ID NO: 60405 - RNA, 24 nt, Synthetic Construct
  source 1..24: mol_type = other RNA
tcctgtactgagctgccccgagat

SEQ ID NO: 60406 - RNA, 25 nt, Synthetic Construct
  source 1..25: mol_type = other RNA
aaaagctgggttgagagggcgaatt

SEQ ID NO: 60407 - RNA, 25 nt, Synthetic Construct
  source 1..25: mol_type = other RNA
aaaagctgggttgagagggcgaatt

SEQ ID NO: 60408 - RNA, 22 nt, Synthetic Construct
  source 1..22: mol_type = other RNA
tgaggtagtagtttgtgttgtt

SEQ ID NO: 60409 - RNA, 22 nt, Synthetic Construct
  source 1..22: mol_type = other RNA
tgtcagtttgtcaaataccccg

SEQ ID NO: 60410 - RNA, 16 nt, Synthetic Construct
  source 1..16: mol_type = other RNA
ttgaccgctctgacca

SEQ ID NO: 60411 - RNA, 27 nt, Synthetic Construct
  source 1..27: mol_type = other RNA
ccccccactgctaaatttgacgggctt

SEQ ID NO: 60412 - RNA, 36 nt, Synthetic Construct; identical to SEQ ID NO: 10982
  source 1..36: mol_type = other RNA

SEQ ID NO: 60413 - RNA, 36 nt, Synthetic Construct; identical to SEQ ID NO: 10982
  source 1..36: mol_type = other RNA

SEQ ID NO: 60414 - RNA, 22 nt, Synthetic Construct
  source 1..22: mol_type = other RNA
tgaggtaatagattgtatagtt

SEQ ID NO: 60415 - RNA, 22 nt, Synthetic Construct
  source 1..22: mol_type = other RNA
tgaggtaatagattgtatagtt

SEQ ID NO: 60416 - RNA, 22 nt, Synthetic Construct
  source 1..22: mol_type = other RNA
tgaggtagtagatcgtatagtt

SEQ ID NO: 60417 - RNA, 22 nt, Synthetic Construct
  source 1..22: mol_type = other RNA
tgaggtagtagatcgtatagtt

SEQ ID NO: 60418 - RNA, 35 nt, Synthetic Construct; identical to SEQ ID NO: 33207
  source 1..35: mol_type = other RNA

SEQ ID NO: 60419 - RNA, 35 nt, Synthetic Construct; identical to SEQ ID NO: 33207
  source 1..35: mol_type = other RNA

SEQ ID NO: 60420 - RNA, 32 nt, Synthetic Construct; identical to SEQ ID NO: 2086
  source 1..32: mol_type = other RNA

SEQ ID NO: 60421 - RNA, 21 nt, Synthetic Construct
  source 1..21: mol_type = other RNA
actcggcgtggcgtcggtcgt

SEQ ID NO: 60422 - RNA, 21 nt, Synthetic Construct
  source 1..21: mol_type = other RNA
tgaggtagtaggttgtataga

SEQ ID NO: 60423 - RNA, 32 nt, Synthetic Construct; identical to SEQ ID NO: 1128
  source 1..32: mol_type = other RNA

SEQ ID NO: 60424 - RNA, 32 nt, Synthetic Construct; identical to SEQ ID NO: 1128
  source 1..32: mol_type = other RNA

SEQ ID NO: 60425 - RNA, 34 nt, Synthetic Construct; identical to SEQ ID NO: 6594
  source 1..34: mol_type = other RNA

SEQ ID NO: 60426 - RNA, 34 nt, Synthetic Construct; identical to SEQ ID NO: 6594
  source 1..34: mol_type = other RNA

SEQ ID NO: 60427 - RNA, 22 nt, Synthetic Construct
  source 1..22: mol_type = other RNA
tccaagtaatccaggataggct

SEQ ID NO: 60428 - RNA, 22 nt, Synthetic Construct
  source 1..22: mol_type = other RNA
tccaagtaatccaggataggct

SEQ ID NO: 60429 - RNA, 21 nt, Synthetic Construct
  source 1..21: mol_type = other RNA
ttcaagtaattcaggataggt

SEQ ID NO: 60430 - RNA, 21 nt, Synthetic Construct
  source 1..21: mol_type = other RNA
ttcaagtaattcaggataggt

SEQ ID NO: 60431 - RNA, 15 nt, Synthetic Construct
  source 1..15: mol_type = other RNA
gtagctcgttgggct

SEQ ID NO: 60432 - RNA, 21 nt, Synthetic Construct
  source 1..21: mol_type = other RNA
tgaagtagtaggttgtgtggt

SEQ ID NO: 60433 - RNA, 19 nt, Synthetic Construct
  source 1..19: mol_type = other RNA
cgactcttagcggtggatc

SEQ ID NO: 60434 - RNA, 19 nt, Synthetic Construct
  source 1..19: mol_type = other RNA
cgactcttagcggtggatc

SEQ ID NO: 60435 - RNA, 43 nt, Synthetic Construct; identical to SEQ ID NO: 6202
  source 1..43: mol_type = other RNA

SEQ ID NO: 60436 - RNA, 26 nt, Synthetic Construct
  source 1..26: mol_type = other RNA
gacttaccaaacctatgcaaactccg

SEQ ID NO: 60437 - RNA, 22 nt, Synthetic Construct
  source 1..22: mol_type = other RNA
tgaggtagtaggtagtgtggtt

SEQ ID NO: 60438 - RNA, 19 nt, Synthetic Construct
  source 1..19: mol_type = other RNA
cgactcttagcggtggatc

SEQ ID NO: 60439 - RNA, 22 nt, Synthetic Construct
  source 1..22: mol_type = other RNA
tgagctagtagtttgtgctgtt

SEQ ID NO: 60440 - RNA, 22 nt, Synthetic Construct
  source 1..22: mol_type = other RNA
tgagctagtagtttgtgctgtt

SEQ ID NO: 60441 - RNA, 22 nt, Synthetic Construct
  source 1..22: mol_type = other RNA
tgaggtaataggttgtatagtt

SEQ ID NO: 60442 - RNA, 22 nt, Synthetic Construct
  source 1..22: mol_type = other RNA
tgagatagtagtttgtgctgtt

SEQ ID NO: 60443 - RNA, 22 nt, Synthetic Construct
  source 1..22: mol_type = other RNA
tgagatagtagtttgtgctgtt

SEQ ID NO: 60444 - RNA, 17 nt, Synthetic Construct
  source 1..17: mol_type = other RNA
cagtagctcgaggaaaa

SEQ ID NO: 60445 - RNA, 19 nt, Synthetic Construct
  source 1..19: mol_type = other RNA
aggacagtgaaacgagtca

SEQ ID NO: 60446 - RNA, 19 nt, Synthetic Construct
  source 1..19: mol_type = other RNA
aggacagtgaaacgagtca

SEQ ID NO: 60447 - RNA, 23 nt, Synthetic Construct
  source 1..23: mol_type = other RNA
tgaggtagtaggctgtgtggttt

SEQ ID NO: 60448 - RNA, 23 nt, Synthetic Construct
  source 1..23: mol_type = other RNA
tgaggtagtaggctgtgtggttt

SEQ ID NO: 60449 - RNA, 21 nt, Synthetic Construct
  source 1..21: mol_type = other RNA
tggggtagtagtttgtgctgt

SEQ ID NO: 60450 - RNA, 22 nt, Synthetic Construct
  source 1..22: mol_type = other RNA
tagctgcacgtaaatattggcg

SEQ ID NO: 60451 - RNA, 23 nt, Synthetic Construct
  source 1..23: mol_type = other RNA
caaggtgctgttcgtgcaggtag

SEQ ID NO: 60452 - RNA, 23 nt, Synthetic Construct
  source 1..23: mol_type = other RNA
caaggtgctgttcgtgcaggtag

SEQ ID NO: 60453 - RNA, 17 nt, Synthetic Construct
  source 1..17: mol_type = other RNA
ccagtaaacggcggccg

SEQ ID NO: 60454 - RNA, 23 nt, Synthetic Construct
  source 1..23: mol_type = other RNA
gtccagttttcccaggaatccct

SEQ ID NO: 60455 - RNA, 23 nt, Synthetic Construct
  source 1..23: mol_type = other RNA
gtccagttttcccaggaatccct

SEQ ID NO: 60456 - RNA, 21 nt, Synthetic Construct
  source 1..21: mol_type = other RNA
tgaggaagtagattgtatagt

SEQ ID NO: 60457 - RNA, 20 nt, Synthetic Construct
  source 1..20: mol_type = other RNA
tgaggtagtaggttgcgtgg

SEQ ID NO: 60458 - RNA, 21 nt, Synthetic Construct
  source 1..21: mol_type = other RNA
tgaggtagtaggttgtgtgga

SEQ ID NO: 60459 - RNA, 22 nt, Synthetic Construct
  source 1..22: mol_type = other RNA
tgaggtagtagtttgtgctggt

SEQ ID NO: 60460 - RNA, 22 nt, Synthetic Construct
  source 1..22: mol_type = other RNA
tgaggtagtaggttgtgtggtt

SEQ ID NO: 60461 - RNA, 22 nt, Synthetic Construct
  source 1..22: mol_type = other RNA
tgaggtagtaggttgtgtggtt

SEQ ID NO: 60462 - RNA, 23 nt, Synthetic Construct
  source 1..23: mol_type = other RNA
tgaggtagtaggttgtgtagttt

SEQ ID NO: 60463 - RNA, 16 nt, Synthetic Construct
  source 1..16: mol_type = other RNA
ccaaggggtcgtgggt

SEQ ID NO: 60464 - RNA, 16 nt, Synthetic Construct
  source 1..16: mol_type = other RNA
ccaaggggtcgtgggt

SEQ ID NO: 60465 - RNA, 21 nt, Synthetic Construct
  source 1..21: mol_type = other RNA
tcctgtactgagctgccacga

SEQ ID NO: 60466 - RNA, 21 nt, Synthetic Construct
  source 1..21: mol_type = other RNA
tcctgtactgagctgccacga

SEQ ID NO: 60467 - RNA, 17 nt, Synthetic Construct
  source 1..17: mol_type = other RNA
gcagatcttggtggtag

SEQ ID NO: 60468 - RNA, 17 nt, Synthetic Construct
  source 1..17: mol_type = other RNA
gcagatcttggtggtag

SEQ ID NO: 60469 - RNA, 20 nt, Synthetic Construct
  source 1..20: mol_type = other RNA
tattgcacattactaagttg

SEQ ID NO: 60470 - RNA, 20 nt, Synthetic Construct
  source 1..20: mol_type = other RNA
tattgcacattactaagttg

SEQ ID NO: 60471 - RNA, 21 nt, Synthetic Construct
  source 1..21: mol_type = other RNA
ctttgttcgattccgttgagt

SEQ ID NO: 60472 - RNA, 22 nt, Synthetic Construct
  source 1..22: mol_type = other RNA
tgaggtagaagtttgtgctgtt

SEQ ID NO: 60473 - RNA, 22 nt, Synthetic Construct
  source 1..22: mol_type = other RNA
tgaggtagaagtttgtgctgtt

SEQ ID NO: 60474 - RNA, 32 nt, Synthetic Construct; identical to SEQ ID NO: 4509
  source 1..32: mol_type = other RNA

SEQ ID NO: 60475 - RNA, 32 nt, Synthetic Construct; identical to SEQ ID NO: 4509
  source 1..32: mol_type = other RNA

SEQ ID NO: 60476 - RNA, 22 nt, Synthetic Construct
  source 1..22: mol_type = other RNA
tagcagcacgtaagtattggcg

SEQ ID NO: 60477 - RNA, 21 nt, Synthetic Construct
  source 1..21: mol_type = other RNA
tggagtgtggcaatggtgttt

SEQ ID NO: 60478 - RNA, 23 nt, Synthetic Construct
  source 1..23: mol_type = other RNA
tgaggggcagagagcgagacttt

SEQ ID NO: 60479 - RNA, 23 nt, Synthetic Construct
  source 1..23: mol_type = other RNA
tgaggggcagagagcgagacttt

SEQ ID NO: 60480 - RNA, 16 nt, Synthetic Construct
  source 1..16: mol_type = other RNA
atctacggccatacca

SEQ ID NO: 60481 - RNA, 22 nt, Synthetic Construct
  source 1..22: mol_type = other RNA
gccgccggtgaaataccactac

SEQ ID NO: 60482 - RNA, 22 nt, Synthetic Construct
  source 1..22: mol_type = other RNA
gccgccggtgaaataccactac

SEQ ID NO: 60483 - RNA, 30 nt, Synthetic Construct; identical to SEQ ID NO: 2840
  source 1..30: mol_type = other RNA

SEQ ID NO: 60484 - RNA, 22 nt, Synthetic Construct
  source 1..22: mol_type = other RNA
ttgcagcacgtaaatattggcg

SEQ ID NO: 60485 - RNA, 22 nt, Synthetic Construct
  source 1..22: mol_type = other RNA
ttgcagcacgtaaatattggcg

SEQ ID NO: 60486 - RNA, 19 nt, Synthetic Construct
  source 1..19: mol_type = other RNA
tgtcagtttgtcaaatacc

SEQ ID NO: 60487 - RNA, 16 nt, Synthetic Construct
  source 1..16: mol_type = other RNA
tattgcacttgtcccg

SEQ ID NO: 60488 - RNA, 16 nt, Synthetic Construct
  source 1..16: mol_type = other RNA
tattgcacttgtcccg

SEQ ID NO: 60489 - RNA, 17 nt, Synthetic Construct
  source 1..17: mol_type = other RNA
cagtcaggatgttggct

SEQ ID NO: 60490 - RNA, 17 nt, Synthetic Construct
  source 1..17: mol_type = other RNA
cagtcaggatgttggct

SEQ ID NO: 60491 - RNA, 22 nt, Synthetic Construct
  source 1..22: mol_type = other RNA
tagcaacacgtaaatattggcg

SEQ ID NO: 60492 - RNA, 18 nt, Synthetic Construct
  source 1..18: mol_type = other RNA
agcagcattgtacagggc

SEQ ID NO: 60493 - RNA, 33 nt, Synthetic Construct; identical to SEQ ID NO: 34848
  source 1..33: mol_type = other RNA

SEQ ID NO: 60494 - RNA, 33 nt, Synthetic Construct; identical to SEQ ID NO: 34848
  source 1..33: mol_type = other RNA

SEQ ID NO: 60495 - RNA, 25 nt, Synthetic Construct
  source 1..25: mol_type = other RNA
ctggccctctctgcccttccgtttt

SEQ ID NO: 60496 - RNA, 16 nt, Synthetic Construct
  source 1..16: mol_type = other RNA
cgactcttagcggtgg

SEQ ID NO: 60497 - RNA, 23 nt, Synthetic Construct
  source 1..23: mol_type = other RNA
caaagtgttgttcgtgcaggtag

SEQ ID NO: 60498 - RNA, 23 nt, Synthetic Construct
  source 1..23: mol_type = other RNA
caaagtgttgttcgtgcaggtag

SEQ ID NO: 60499 - RNA, 21 nt, Synthetic Construct
  source 1..21: mol_type = other RNA
caacggaatcccaaaagcagc

SEQ ID NO: 60500 - RNA, 22 nt, Synthetic Construct
  source 1..22: mol_type = other RNA
tcctgtactgagctgcctcgag

SEQ ID NO: 60501 - RNA, 35 nt, Synthetic Construct; identical to SEQ ID NO: 9871
  source 1..35: mol_type = other RNA

SEQ ID NO: 60502 - RNA, 35 nt, Synthetic Construct; identical to SEQ ID NO: 9871
  source 1..35: mol_type = other RNA

SEQ ID NO: 60503 - RNA, 20 nt, Synthetic Construct
  source 1..20: mol_type = other RNA
tagcagcacataatggtttg

SEQ ID NO: 60504 - RNA, 15 nt, Synthetic Construct
  source 1..15: mol_type = other RNA
cctcgcgcgattgga

SEQ ID NO: 60505 - RNA, 22 nt, Synthetic Construct
  source 1..22: mol_type = other RNA
ttataatacaacctgataagtg

SEQ ID NO: 60506 - RNA, 22 nt, Synthetic Construct
  source 1..22: mol_type = other RNA
ttataatacaacctgataagtg

SEQ ID NO: 60507 - RNA, 20 nt, Synthetic Construct
  source 1..20: mol_type = other RNA
tggagtgtgacaatggtgtt

SEQ ID NO: 60508 - RNA, 20 nt, Synthetic Construct
  source 1..20: mol_type = other RNA
tggagtgtgacaatggtgtt

SEQ ID NO: 60509 - RNA, 23 nt, Synthetic Construct
  source 1..23: mol_type = other RNA
tgaaagtaggtcatcgtcaggct

SEQ ID NO: 60510 - RNA, 23 nt, Synthetic Construct
  source 1..23: mol_type = other RNA
tgaaagtaggtcatcgtcaggct

SEQ ID NO: 60511 - RNA, 21 nt, Synthetic Construct
  source 1..21: mol_type = other RNA
tgaggtagtaggtcgtatagt

SEQ ID NO: 60512 - RNA, 23 nt, Synthetic Construct
  source 1..23: mol_type = other RNA
atgacacgatcactcccgttgag

SEQ ID NO: 60513 - RNA, 23 nt, Synthetic Construct
  source 1..23: mol_type = other RNA
atgacacgatcactcccgttgag

SEQ ID NO: 60514 - RNA, 34 nt, Synthetic Construct; identical to SEQ ID NO: 35301
  source 1..34: mol_type = other RNA

SEQ ID NO: 60515 - RNA, 34 nt, Synthetic Construct; identical to SEQ ID NO: 35301
  source 1..34: mol_type = other RNA

SEQ ID NO: 60516 - RNA, 22 nt, Synthetic Construct
  source 1..22: mol_type = other RNA
tagtagcacgtaaatattggcg

SEQ ID NO: 60517 - RNA, 22 nt, Synthetic Construct
  source 1..22: mol_type = other RNA
tagtagcacgtaaatattggcg

SEQ ID NO: 60518 - RNA, 23 nt, Synthetic Construct
  source 1..23: mol_type = other RNA
aggtaatacgacgtacttagtgt

SEQ ID NO: 60519 - RNA, 17 nt, Synthetic Construct
  source 1..17: mol_type = other RNA
acagtgtgaatcggcgc

SEQ ID NO: 60520 - RNA, 26 nt, Synthetic Construct
  source 1..26: mol_type = other RNA
ttctcactactgcacttgactagtct

SEQ ID NO: 60521 - RNA, 26 nt, Synthetic Construct
  source 1..26: mol_type = other RNA
ttctcactactgcacttgactagtct

SEQ ID NO: 60522 - RNA, 21 nt, Synthetic Construct
  source 1..21: mol_type = other RNA
tcctgtactgagctgccccgg

SEQ ID NO: 60523 - RNA, 22 nt, Synthetic Construct
  source 1..22: mol_type = other RNA
tgaggtagtaggtagtgtggtt

SEQ ID NO: 60524 - RNA, 22 nt, Synthetic Construct
  source 1..22: mol_type = other RNA
tgaggtagtaggtagtgtggtt

SEQ ID NO: 60525 - RNA, 22 nt, Synthetic Construct
  source 1..22: mol_type = other RNA
tagcagcacgtgaatattggcg

SEQ ID NO: 60526 - RNA, 15 nt, Synthetic Construct
  source 1..15: mol_type = other RNA
ccgcttttgtcaggg

SEQ ID NO: 60527 - RNA, 22 nt, Synthetic Construct
  source 1..22: mol_type = other RNA
taccctgtagatccgaatttgt

SEQ ID NO: 60528 - RNA, 35 nt, Synthetic Construct; identical to SEQ ID NO: 2354
  source 1..35: mol_type = other RNA

SEQ ID NO: 60529 - RNA, 19 nt, Synthetic Construct
  source 1..19: mol_type = other RNA
gtggtacgatcatacctgg

SEQ ID NO: 60530 - RNA, 19 nt, Synthetic Construct
  source 1..19: mol_type = other RNA
gtggtacgatcatacctgg

SEQ ID NO: 60531 - RNA, 22 nt, Synthetic Construct
  source 1..22: mol_type = other RNA
tcgtaccgtgagtaataaagcg

SEQ ID NO: 60532 - RNA, 21 nt, Synthetic Construct
  source 1..21: mol_type = other RNA
taaggtagtaggttgtatagt

SEQ ID NO: 60533 - RNA, 21 nt, Synthetic Construct
  source 1..21: mol_type = other RNA
taaggtagtaggttgtatagt

SEQ ID NO: 60534 - RNA, 22 nt, Synthetic Construct
  source 1..22: mol_type = other RNA
tgaggtagtagtttgtgcggtt

SEQ ID NO: 60535 - RNA, 22 nt, Synthetic Construct
  source 1..22: mol_type = other RNA
tgaggtagtagtttgtgcggtt

SEQ ID NO: 60536 - RNA, 22 nt, Synthetic Construct
  source 1..22: mol_type = other RNA
gtcagtttgtcaaataccccaa

SEQ ID NO: 60537 - RNA, 22 nt, Synthetic Construct
  source 1..22: mol_type = other RNA
ttcaggtaatccaggataggct

SEQ ID NO: 60538 - RNA, 22 nt, Synthetic Construct
  source 1..22: mol_type = other RNA
ttcaggtaatccaggataggct

SEQ ID NO: 60539 - RNA, 22 nt, Synthetic Construct
  source 1..22: mol_type = other RNA
ttcaagtaacccaggataggct

SEQ ID NO: 60540 - RNA, 22 nt, Synthetic Construct
  source 1..22: mol_type = other RNA
ttcaagtaacccaggataggct

SEQ ID NO: 60541 - RNA, 36 nt, Synthetic Construct; identical to SEQ ID NO: 2478
  source 1..36: mol_type = other RNA

SEQ ID NO: 60542 - RNA, 25 nt, Synthetic Construct
  source 1..25: mol_type = other RNA
caaagtgctgttcgtgcaggtagtt

SEQ ID NO: 60543 - RNA, 25 nt, Synthetic Construct
  source 1..25: mol_type = other RNA
caaagtgctgttcgtgcaggtagtt

SEQ ID NO: 60544 - RNA, 22 nt, Synthetic Construct
  source 1..22: mol_type = other RNA
tgaggtagtaggttgtatagtt

SEQ ID NO: 60545 - RNA, 30 nt, Synthetic Construct; identical to SEQ ID NO: 1236
  source 1..30: mol_type = other RNA

SEQ ID NO: 60546 - RNA, 30 nt, Synthetic Construct; identical to SEQ ID NO: 1236
  source 1..30: mol_type = other RNA

SEQ ID NO: 60547 - RNA, 22 nt, Synthetic Construct
  source 1..22: mol_type = other RNA
tggggtagtagtttgtgctgtt

SEQ ID NO: 60548 - RNA, 17 nt, Synthetic Construct
  source 1..17: mol_type = other RNA
cagagacgagtcgacca

SEQ ID NO: 60549 - RNA, 17 nt, Synthetic Construct
  source 1..17: mol_type = other RNA
cagagacgagtcgacca

SEQ ID NO: 60550 - RNA, 21 nt, Synthetic Construct
  source 1..21: mol_type = other RNA
ggaggtagtaggttgtgtggt

SEQ ID NO: 60551 - RNA, 21 nt, Synthetic Construct
  source 1..21: mol_type = other RNA
ggaggtagtaggttgtgtggt

SEQ ID NO: 60552 - RNA, 23 nt, Synthetic Construct
  source 1..23: mol_type = other RNA
cagtgcaatgttaaaagggcatt

SEQ ID NO: 60553 - RNA, 23 nt, Synthetic Construct
  source 1..23: mol_type = other RNA
cagtgcaatgttaaaagggcatt

SEQ ID NO: 60554 - RNA, 22 nt, Synthetic Construct
  source 1..22: mol_type = other RNA
taactcattaagcgaatctcgc

SEQ ID NO: 60555 - RNA, 22 nt, Synthetic Construct
  source 1..22: mol_type = other RNA
taactcattaagcgaatctcgc

SEQ ID NO: 60556 - RNA, 33 nt, Synthetic Construct; identical to SEQ ID NO: 2638
  source 1..33: mol_type = other RNA

SEQ ID NO: 60557 - RNA, 33 nt, Synthetic Construct; identical to SEQ ID NO: 2638
  source 1..33: mol_type = other RNA

SEQ ID NO: 60558 - RNA, 19 nt, Synthetic Construct
  source 1..19: mol_type = other RNA
atcacattgccagggattt

SEQ ID NO: 60559 - RNA, 19 nt, Synthetic Construct
  source 1..19: mol_type = other RNA
atcacattgccagggattt

SEQ ID NO: 60560 - RNA, 22 nt, Synthetic Construct
  source 1..22: mol_type = other RNA
tagcagcacataatggtttgtg

SEQ ID NO: 60561 - RNA, 20 nt, Synthetic Construct
  source 1..20: mol_type = other RNA
agaggtagtagtttgtgctg

SEQ ID NO: 60562 - RNA, 42 nt, Synthetic Construct; identical to SEQ ID NO: 19836
  source 1..42: mol_type = other RNA

SEQ ID NO: 60563 - RNA, 42 nt, Synthetic Construct; identical to SEQ ID NO: 19836
  source 1..42: mol_type = other RNA

SEQ ID NO: 60564 - RNA, 24 nt, Synthetic Construct
  source 1..24: mol_type = other RNA
gaaagattaaggcaagaggttagc

SEQ ID NO: 60565 - RNA, 24 nt, Synthetic Construct
  source 1..24: mol_type = other RNA
gaaagattaaggcaagaggttagc

SEQ ID NO: 60566 - RNA, 20 nt, Synthetic Construct
  source 1..20: mol_type = other RNA
tgaggtagtaggttgtatgg

SEQ ID NO: 60567 - RNA, 20 nt, Synthetic Construct
  source 1..20: mol_type = other RNA
tgaggtagtaggttgtatgg

SEQ ID NO: 60568 - RNA, 22 nt, Synthetic Construct
  source 1..22: mol_type = other RNA
tgaggtagtaggctgtatagtt

SEQ ID NO: 60569 - RNA, 24 nt, Synthetic Construct
  source 1..24: mol_type = other RNA
tgcggggctagggctaacagcatt

SEQ ID NO: 60570 - RNA, 24 nt, Synthetic Construct
  source 1..24: mol_type = other RNA
tgcggggctagggctaacagcatt

SEQ ID NO: 60571 - RNA, 23 nt, Synthetic Construct
  source 1..23: mol_type = other RNA
tgtcagtttgccaaataccccaa

SEQ ID NO: 60572 - RNA, 23 nt, Synthetic Construct
  source 1..23: mol_type = other RNA
tgtcagtttgccaaataccccaa

SEQ ID NO: 60573 - RNA, 21 nt, Synthetic Construct
  source 1..21: mol_type = other RNA
agaggggcagagagcgagact

SEQ ID NO: 60574 - RNA, 31 nt, Synthetic Construct; identical to SEQ ID NO: 774
  source 1..31: mol_type = other RNA

SEQ ID NO: 60575 - RNA, 31 nt, Synthetic Construct; identical to SEQ ID NO: 774
  source 1..31: mol_type = other RNA

SEQ ID NO: 60576 - RNA, 22 nt, Synthetic Construct
  source 1..22: mol_type = other RNA
tagcagcacataaatattggcg

SEQ ID NO: 60577 - RNA, 22 nt, Synthetic Construct
  source 1..22: mol_type = other RNA
caatgcacttgtctcggtctga

SEQ ID NO: 60578 - RNA, 16 nt, Synthetic Construct
  source 1..16: mol_type = other RNA
ttggcctcaagtcagg

SEQ ID NO: 60579 - RNA, 16 nt, Synthetic Construct
  source 1..16: mol_type = other RNA
ttggcctcaagtcagg

SEQ ID NO: 60580 - RNA, 16 nt, Synthetic Construct
  source 1..16: mol_type = other RNA
ggtagctcgttgggct

SEQ ID NO: 60581 - RNA, 22 nt, Synthetic Construct
  source 1..22: mol_type = other RNA
tgaggtagtaggttgtataatt

SEQ ID NO: 60582 - RNA, 23 nt, Synthetic Construct
  source 1..23: mol_type = other RNA
tctctcggctcctcgcggctcgt

SEQ ID NO: 60583 - RNA, 28 nt, Synthetic Construct
  source 1..28: mol_type = other RNA
tcccacatggtctagcggttaggattcc

SEQ ID NO: 60584 - RNA, 28 nt, Synthetic Construct
  source 1..28: mol_type = other RNA
tcccacatggtctagcggttaggattcc

SEQ ID NO: 60585 - RNA, 23 nt, Synthetic Construct
  source 1..23: mol_type = other RNA
tggctcagttcagcaggaacagt

SEQ ID NO: 60586 - RNA, 23 nt, Synthetic Construct
  source 1..23: mol_type = other RNA
tggctcagttcagcaggaacagt

SEQ ID NO: 60587 - RNA, 22 nt, Synthetic Construct
  source 1..22: mol_type = other RNA
tgaggtagaagattgtatagtt

SEQ ID NO: 60588 - RNA, 22 nt, Synthetic Construct
  source 1..22: mol_type = other RNA
tgaggtagaagattgtatagtt

SEQ ID NO: 60589 - RNA, 22 nt, Synthetic Construct
  source 1..22: mol_type = other RNA
tagcagcacgtaagtattggcg

SEQ ID NO: 60590 - RNA, 20 nt, Synthetic Construct
  source 1..20: mol_type = other RNA
tgaggtagtaggctgtgtgg

SEQ ID NO: 60591 - RNA, 23 nt, Synthetic Construct
  source 1..23: mol_type = other RNA
cgacggaatcccaaaagcagctg

SEQ ID NO: 60592 - RNA, 22 nt, Synthetic Construct
  source 1..22: mol_type = other RNA
tagcagcgcgtaaatattggcg

SEQ ID NO: 60593 - RNA, 21 nt, Synthetic Construct
  source 1..21: mol_type = other RNA
tcctgtactgagctgccacga

SEQ ID NO: 60594 - RNA, 21 nt, Synthetic Construct
  source 1..21: mol_type = other RNA
tcctgtactgagctgccacga

SEQ ID NO: 60595 - RNA, 24 nt, Synthetic Construct
  source 1..24: mol_type = other RNA
tcccacatggtctagcggttagga

SEQ ID NO: 60596 - RNA, 22 nt, Synthetic Construct
  source 1..22: mol_type = other RNA
tggagtgtgacaatggtgttaa

SEQ ID NO: 60597 - RNA, 22 nt, Synthetic Construct
  source 1..22: mol_type = other RNA
ggcagcattgtacagggctatg

SEQ ID NO: 60598 - RNA, 34 nt, Synthetic Construct; identical to SEQ ID NO: 2529
  source 1..34: mol_type = other RNA

SEQ ID NO: 60599 - RNA, 24 nt, Synthetic Construct
  source 1..24: mol_type = other RNA
tgtgatttctgcccagtgctctga

SEQ ID NO: 60600 - RNA, 24 nt, Synthetic Construct
  source 1..24: mol_type = other RNA
tgtgatttctgcccagtgctctga

SEQ ID NO: 60601 - RNA, 22 nt, Synthetic Construct
  source 1..22: mol_type = other RNA
tgaggtagtagtttgtgctgct

SEQ ID NO: 60602 - RNA, 16 nt, Synthetic Construct
  source 1..16: mol_type = other RNA
ggtagctcgttgggct

SEQ ID NO: 60603 - RNA, 16 nt, Synthetic Construct
  source 1..16: mol_type = other RNA
ggtagctcgttgggct

SEQ ID NO: 60604 - RNA, 16 nt, Synthetic Construct
  source 1..16: mol_type = other RNA
caggacggtggccatg

SEQ ID NO: 60605 - RNA, 16 nt, Synthetic Construct
  source 1..16: mol_type = other RNA
caggacggtggccatg

SEQ ID NO: 60606 - RNA, 28 nt, Synthetic Construct
  source 1..28: mol_type = other RNA
ccccccaccgctaaatttgactggcttt

SEQ ID NO: 60607 - RNA, 21 nt, Synthetic Construct
  source 1..21: mol_type = other RNA
tggggtagtaggttgtatagt

SEQ ID NO: 60608 - RNA, 24 nt, Synthetic Construct
  source 1..24: mol_type = other RNA
tgtaaacgtccccgactggaagct

SEQ ID NO: 60609 - RNA, 21 nt, Synthetic Construct
  source 1..21: mol_type = other RNA
tcctgtactgagctgcaccga

SEQ ID NO: 60610 - RNA, 21 nt, Synthetic Construct
  source 1..21: mol_type = other RNA
tcctgtactgagctgcaccga

SEQ ID NO: 60611 - RNA, 20 nt, Synthetic Construct
  source 1..20: mol_type = other RNA
tagcaccatttgaaatcagt

SEQ ID NO: 60612 - RNA, 23 nt, Synthetic Construct
  source 1..23: mol_type = other RNA
caaagtgctgttcgtgtaggtag

SEQ ID NO: 60613 - RNA, 37 nt, Synthetic Construct; identical to SEQ ID NO: 2607
  source 1..37: mol_type = other RNA

SEQ ID NO: 60614 - RNA, 22 nt, Synthetic Construct
  source 1..22: mol_type = other RNA
cgaggtagtagattgtatagtt

SEQ ID NO: 60615 - RNA, 22 nt, Synthetic Construct
  source 1..22: mol_type = other RNA
cgaggtagtagattgtatagtt

SEQ ID NO: 60616 - RNA, 22 nt, Synthetic Construct
  source 1..22: mol_type = other RNA
tggagtgtgacaatggtgcttg

SEQ ID NO: 60617 - RNA, 22 nt, Synthetic Construct
  source 1..22: mol_type = other RNA
tggagtgtgacaatggtgcttg

SEQ ID NO: 60618 - RNA, 22 nt, Synthetic Construct
  source 1..22: mol_type = other RNA
tcagtgcactacagagctttgt

SEQ ID NO: 60619 - RNA, 22 nt, Synthetic Construct
  source 1..22: mol_type = other RNA
tgaggtagtaggttatatagtt

SEQ ID NO: 60620 - RNA, 22 nt, Synthetic Construct
  source 1..22: mol_type = other RNA
tgaggtagtaggttatatagtt

SEQ ID NO: 60621 - RNA, 22 nt, Synthetic Construct
  source 1..22: mol_type = other RNA
tgaggtagtaggttgtgtggtc

SEQ ID NO: 60622 - RNA, 31 nt, Synthetic Construct; identical to SEQ ID NO: 2278
  source 1..31: mol_type = other RNA

SEQ ID NO: 60623 - RNA, 21 nt, Synthetic Construct
  source 1..21: mol_type = other RNA
tggggtgtgacaatggtgttt

SEQ ID NO: 60624 - RNA, 25 nt, Synthetic Construct
  source 1..25: mol_type = other RNA
ccccactgctaaatttgactggctt

SEQ ID NO: 60625 - RNA, 23 nt, Synthetic Construct
  source 1..23: mol_type = other RNA
cccagtgttcagactacctgttc

SEQ ID NO: 60626 - RNA, 23 nt, Synthetic Construct
  source 1..23: mol_type = other RNA
cccagtgttcagactacctgttc

SEQ ID NO: 60627 - RNA, 22 nt, Synthetic Construct
  source 1..22: mol_type = other RNA
tagcagcacgcaaatattggcg

SEQ ID NO: 60628 - RNA, 22 nt, Synthetic Construct
  source 1..22: mol_type = other RNA
tagcagcacgcaaatattggcg

SEQ ID NO: 60629 - RNA, 18 nt, Synthetic Construct
  source 1..18: mol_type = other RNA
cctgtaccgatcaatagt

SEQ ID NO: 60630 - RNA, 18 nt, Synthetic Construct
  source 1..18: mol_type = other RNA
cctgtaccgatcaatagt

SEQ ID NO: 60631 - RNA, 37 nt, Synthetic Construct; identical to SEQ ID NO: 11100
  source 1..37: mol_type = other RNA

SEQ ID NO: 60632 - RNA, 37 nt, Synthetic Construct; identical to SEQ ID NO: 11100
  source 1..37: mol_type = other RNA

SEQ ID NO: 60633 - RNA, 37 nt, Synthetic Construct; identical to SEQ ID NO: 2482
  source 1..37: mol_type = other RNA

SEQ ID NO: 60634 - RNA, 15 nt, Synthetic Construct
  source 1..15: mol_type = other RNA
ggccgtcgtcagctc

SEQ ID NO: 60635 - RNA, 22 nt, Synthetic Construct
  source 1..22: mol_type = other RNA
tgaggtagtaggatgtatagtt

SEQ ID NO: 60636 - RNA, 22 nt, Synthetic Construct
  source 1..22: mol_type = other RNA
tggggtagtagtttgtgctgtt

SEQ ID NO: 60637 - RNA, 23 nt, Synthetic Construct
  source 1..23: mol_type = other RNA
gcgactggtaactgggatgaagt

SEQ ID NO: 60638 - RNA, 23 nt, Synthetic Construct
  source 1..23: mol_type = other RNA
gcgactggtaactgggatgaagt

SEQ ID NO: 60639 - RNA, 22 nt, Synthetic Construct
  source 1..22: mol_type = other RNA
tgagaactgaattccatgggta

SEQ ID NO: 60640 - RNA, 22 nt, Synthetic Construct
  source 1..22: mol_type = other RNA
tgagaactgaattccatgggta

SEQ ID NO: 60641 - RNA, 23 nt, Synthetic Construct
  source 1..23: mol_type = other RNA
tggtaaaacgacgtacttagtgt

SEQ ID NO: 60642 - RNA, 23 nt, Synthetic Construct
  source 1..23: mol_type = other RNA
tgtcggtttgtcaaataccccaa

SEQ ID NO: 60643 - RNA, 23 nt, Synthetic Construct
  source 1..23: mol_type = other RNA
tgtcggtttgtcaaataccccaa

SEQ ID NO: 60644 - RNA, 27 nt, Synthetic Construct
  source 1..27: mol_type = other RNA
ccccccactgctaagtttgactggctt

SEQ ID NO: 60645 - RNA, 16 nt, Synthetic Construct
  source 1..16: mol_type = other RNA
gtctacagccatacca

SEQ ID NO: 60646 - RNA, 16 nt, Synthetic Construct
  source 1..16: mol_type = other RNA
gtctacagccatacca

SEQ ID NO: 60647 - RNA, 23 nt, Synthetic Construct
  source 1..23: mol_type = other RNA
tcctgtactgggctgccccgaga

SEQ ID NO: 60648 - RNA, 22 nt, Synthetic Construct
  source 1..22: mol_type = other RNA
tgaggtagtaggttgagtggtt

SEQ ID NO: 60649 - RNA, 22 nt, Synthetic Construct
  source 1..22: mol_type = other RNA
tgaggtagtaggttgagtggtt

SEQ ID NO: 60650 - RNA, 25 nt, Synthetic Construct
  source 1..25: mol_type = other RNA
tcgggcctggttagtacttggatgg

SEQ ID NO: 60651 - RNA, 18 nt, Synthetic Construct
  source 1..18: mol_type = other RNA
cctgaagaataagcaccg

SEQ ID NO: 60652 - RNA, 28 nt, Synthetic Construct
  source 1..28: mol_type = other RNA
ggtggctgtagctcagttggtagagtcc

SEQ ID NO: 60653 - RNA, 28 nt, Synthetic Construct
  source 1..28: mol_type = other RNA
ggtggctgtagctcagttggtagagtcc

SEQ ID NO: 60654 - RNA, 21 nt, Synthetic Construct
  source 1..21: mol_type = other RNA
tgaggtagaaggttgtatagt

SEQ ID NO: 60655 - RNA, 21 nt, Synthetic Construct
  source 1..21: mol_type = other RNA
tgaggtagaaggttgtatagt

SEQ ID NO: 60656 - RNA, 17 nt, Synthetic Construct
  source 1..17: mol_type = other RNA
atcgtgacgatagtgca

SEQ ID NO: 60657 - RNA, 21 nt, Synthetic Construct
  source 1..21: mol_type = other RNA
tctcccaacccttgtaccagt

SEQ ID NO: 60658 - RNA, 21 nt, Synthetic Construct
  source 1..21: mol_type = other RNA
tctcccaacccttgtaccagt

SEQ ID NO: 60659 - RNA, 24 nt, Synthetic Construct
  source 1..24: mol_type = other RNA
cggagaaggttagctcagccaact

SEQ ID NO: 60660 - RNA, 24 nt, Synthetic Construct
  source 1..24: mol_type = other RNA
cggagaaggttagctcagccaact

SEQ ID NO: 60661 - RNA, 26 nt, Synthetic Construct
  source 1..26: mol_type = other RNA
gactcttagcggtggatcactcggct

SEQ ID NO: 60662 - RNA, 19 nt, Synthetic Construct
  source 1..19: mol_type = other RNA
tccccggcacctccaccat

SEQ ID NO: 60663 - RNA, 19 nt, Synthetic Construct
  source 1..19: mol_type = other RNA
tccccggcacctccaccat

SEQ ID NO: 60664 - RNA, 31 nt, Synthetic Construct; identical to SEQ ID NO: 2293
  source 1..31: mol_type = other RNA

SEQ ID NO: 60665 - RNA, 23 nt, Synthetic Construct
  source 1..23: mol_type = other RNA
cgagagtaggacgttgccaggtt

SEQ ID NO: 60666 - RNA, 23 nt, Synthetic Construct
  source 1..23: mol_type = other RNA
cgagagtaggacgttgccaggtt

SEQ ID NO: 60667 - RNA, 23 nt, Synthetic Construct
  source 1..23: mol_type = other RNA
tccagtactgagctgccccgagt

SEQ ID NO: 60668 - RNA, 23 nt, Synthetic Construct
  source 1..23: mol_type = other RNA
tccagtactgagctgccccgagt

SEQ ID NO: 60669 - RNA, 22 nt, Synthetic Construct
  source 1..22: mol_type = other RNA
tcgtacagtgagtaataatgcg

SEQ ID NO: 60670 - RNA, 30 nt, Synthetic Construct; identical to SEQ ID NO: 1535
  source 1..30: mol_type = other RNA

SEQ ID NO: 60671 - RNA, 21 nt, Synthetic Construct
  source 1..21: mol_type = other RNA
tcctgtctgaatatgggggga

SEQ ID NO: 60672 - RNA, 21 nt, Synthetic Construct
  source 1..21: mol_type = other RNA
tcctgtctgaatatgggggga

SEQ ID NO: 60673 - RNA, 42 nt, Synthetic Construct; identical to SEQ ID NO: 19836
  source 1..42: mol_type = other RNA

SEQ ID NO: 60674 - RNA, 20 nt, Synthetic Construct
  source 1..20: mol_type = other RNA
tagcttatcagactgatgtt

SEQ ID NO: 60675 - RNA, 27 nt, Synthetic Construct
  source 1..27: mol_type = other RNA
ccccccacagctaaatttgactggcta

SEQ ID NO: 60676 - RNA, 27 nt, Synthetic Construct
  source 1..27: mol_type = other RNA
ccccccacagctaaatttgactggcta

SEQ ID NO: 60677 - RNA, 19 nt, Synthetic Construct
  source 1..19: mol_type = other RNA
gttctacagtccgacgatc

SEQ ID NO: 60678 - RNA, 19 nt, Synthetic Construct
  source 1..19: mol_type = other RNA
gttctacagtccgacgatc

SEQ ID NO: 60679 - RNA, 23 nt, Synthetic Construct
  source 1..23: mol_type = other RNA
tgaggtagtaggttgtgtggtat

SEQ ID NO: 60680 - RNA, 23 nt, Synthetic Construct
  source 1..23: mol_type = other RNA
tcctgtactgagctgccctgagt

SEQ ID NO: 60681 - RNA, 22 nt, Synthetic Construct
  source 1..22: mol_type = other RNA
tgagaactgaactccatgggtt

SEQ ID NO: 60682 - RNA, 24 nt, Synthetic Construct
  source 1..24: mol_type = other RNA
actcacacagaaatcgcacccgtc

SEQ ID NO: 60683 - RNA, 22 nt, Synthetic Construct
  source 1..22: mol_type = other RNA
cgactcttagcggtggatcact

SEQ ID NO: 60684 - RNA, 22 nt, Synthetic Construct
  source 1..22: mol_type = other RNA
cgactcttagcggtggatcact

SEQ ID NO: 60685 - RNA, 23 nt, Synthetic Construct
  source 1..23: mol_type = other RNA
tgaggggcagagagagagacttt

SEQ ID NO: 60686 - RNA, 23 nt, Synthetic Construct
  source 1..23: mol_type = other RNA
tgaggggcagagagagagacttt

SEQ ID NO: 60687 - RNA, 22 nt, Synthetic Construct
  source 1..22: mol_type = other RNA
tagcaacacgtaaatattggcg

SEQ ID NO: 60688 - RNA, 18 nt, Synthetic Construct
  source 1..18: mol_type = other RNA
tcagtagctcgaggaaaa

SEQ ID NO: 60689 - RNA, 34 nt, Synthetic Construct; identical to SEQ ID NO: 16999
  source 1..34: mol_type = other RNA

SEQ ID NO: 60690 - RNA, 34 nt, Synthetic Construct; identical to SEQ ID NO: 16999
  source 1..34: mol_type = other RNA

SEQ ID NO: 60691 - RNA, 15 nt, Synthetic Construct
  source 1..15: mol_type = other RNA
cccagaaacccggtc

SEQ ID NO: 60692 - RNA, 25 nt, Synthetic Construct
  source 1..25: mol_type = other RNA
tgtaaacatccccgactggaagcta

SEQ ID NO: 60693 - RNA, 25 nt, Synthetic Construct
  source 1..25: mol_type = other RNA
tgtaaacatccccgactggaagcta

SEQ ID NO: 60694 - RNA, 22 nt, Synthetic Construct
  source 1..22: mol_type = other RNA
gcgtaccgtgagtaataatgcg

SEQ ID NO: 60695 - RNA, 22 nt, Synthetic Construct
  source 1..22: mol_type = other RNA
gcgtaccgtgagtaataatgcg

SEQ ID NO: 60696 - RNA, 25 nt, Synthetic Construct
  source 1..25: mol_type = other RNA
ggtaaaatggctgagtgaagcattg

SEQ ID NO: 60697 - RNA, 25 nt, Synthetic Construct
  source 1..25: mol_type = other RNA
ggtaaaatggctgagtgaagcattg

SEQ ID NO: 60698 - RNA, 27 nt, Synthetic Construct
  source 1..27: mol_type = other RNA
ccccccactgctaaatttgactggctc

SEQ ID NO: 60699 - RNA, 22 nt, Synthetic Construct
  source 1..22: mol_type = other RNA
tgaggtaataggttgtatagtt

SEQ ID NO: 60700 - RNA, 27 nt, Synthetic Construct
  source 1..27: mol_type = other RNA
gcgggtgatgcgaactggagtctgagc

SEQ ID NO: 60701 - RNA, 27 nt, Synthetic Construct
  source 1..27: mol_type = other RNA
gcgggtgatgcgaactggagtctgagc

SEQ ID NO: 60702 - RNA, 24 nt, Synthetic Construct
  source 1..24: mol_type = other RNA
tgagaactgaattccatgggttga

SEQ ID NO: 60703 - RNA, 23 nt, Synthetic Construct
  source 1..23: mol_type = other RNA
agctacattgtctgctgggtttt

SEQ ID NO: 60704 - RNA, 23 nt, Synthetic Construct
  source 1..23: mol_type = other RNA
agctacattgtctgctgggtttt

SEQ ID NO: 60705 - RNA, 21 nt, Synthetic Construct
  source 1..21: mol_type = other RNA
tggggtagtagattgtatagt

SEQ ID NO: 60706 - RNA, 23 nt, Synthetic Construct
  source 1..23: mol_type = other RNA
tggctcagttcagcaggaacaga

SEQ ID NO: 60707 - RNA, 24 nt, Synthetic Construct
  source 1..24: mol_type = other RNA
tgtaaacatccctgactggaagct

SEQ ID NO: 60708 - RNA, 24 nt, Synthetic Construct
  source 1..24: mol_type = other RNA
tgtaaacatccctgactggaagct

SEQ ID NO: 60709 - RNA, 22 nt, Synthetic Construct
  source 1..22: mol_type = other RNA
tagcagcacgtaaatgttggcg

SEQ ID NO: 60710 - RNA, 23 nt, Synthetic Construct
  source 1..23: mol_type = other RNA
tgaggtagcaggttgtgtggttt

SEQ ID NO: 60711 - RNA, 22 nt, Synthetic Construct
  source 1..22: mol_type = other RNA
tgaggtagtagattgtgctgtt

SEQ ID NO: 60712 - RNA, 23 nt, Synthetic Construct
  source 1..23: mol_type = other RNA
tgaggtagtaggttgtatggttt

SEQ ID NO: 60713 - RNA, 23 nt, Synthetic Construct
  source 1..23: mol_type = other RNA
tgaggtagtaggttgtatggttt

SEQ ID NO: 60714 - RNA, 24 nt, Synthetic Construct
  source 1..24: mol_type = other RNA
tgtcagtttgtcaaataccccaac

SEQ ID NO: 60715 - RNA, 31 nt, Synthetic Construct; identical to SEQ ID NO: 774
  source 1..31: mol_type = other RNA

SEQ ID NO: 60716 - RNA, 31 nt, Synthetic Construct; identical to SEQ ID NO: 774
  source 1..31: mol_type = other RNA

SEQ ID NO: 60717 - RNA, 16 nt, Synthetic Construct
  source 1..16: mol_type = other RNA
agtcaggatgttggct

SEQ ID NO: 60718 - RNA, 16 nt, Synthetic Construct
  source 1..16: mol_type = other RNA
agtcaggatgttggct

SEQ ID NO: 60719 - RNA, 22 nt, Synthetic Construct
  source 1..22: mol_type = other RNA
tagcagcacgtacatattggcg

SEQ ID NO: 60720 - RNA, 22 nt, Synthetic Construct
  source 1..22: mol_type = other RNA
tactgcacttgtcccggcctgt

SEQ ID NO: 60721 - RNA, 23 nt, Synthetic Construct
  source 1..23: mol_type = other RNA
tcctgtactgagctgccctgaga

SEQ ID NO: 60722 - RNA, 15 nt, Synthetic Construct
  source 1..15: mol_type = other RNA
cccagaaacccggtc

SEQ ID NO: 60723 - RNA, 22 nt, Synthetic Construct
  source 1..22: mol_type = other RNA
tcctgtactgagccgccccgag

SEQ ID NO: 60724 - RNA, 22 nt, Synthetic Construct
  source 1..22: mol_type = other RNA
tcctgtactgagccgccccgag

SEQ ID NO: 60725 - RNA, 22 nt, Synthetic Construct
  source 1..22: mol_type = other RNA
gtaaacggcgggagtaactatg

SEQ ID NO: 60726 - RNA, 21 nt, Synthetic Construct
  source 1..21: mol_type = other RNA
tgaggtagtaggttgtgtgga

SEQ ID NO: 60727 - RNA, 23 nt, Synthetic Construct
  source 1..23: mol_type = other RNA
tacagtactgtgataactgaagt

SEQ ID NO: 60728 - RNA, 23 nt, Synthetic Construct
  source 1..23: mol_type = other RNA
tacagtactgtgataactgaagt

SEQ ID NO: 60729 - RNA, 22 nt, Synthetic Construct
  source 1..22: mol_type = other RNA
tgaggtagcagtttgtgctgtt

SEQ ID NO: 60730 - RNA, 25 nt, Synthetic Construct
  source 1..25: mol_type = other RNA
ggtaaaatcgctgagtgaagcattg

SEQ ID NO: 60731 - RNA, 23 nt, Synthetic Construct
  source 1..23: mol_type = other RNA
taaagtgctgttcgtgcaggtag

SEQ ID NO: 60732 - RNA, 23 nt, Synthetic Construct
  source 1..23: mol_type = other RNA
caaagtgccgttcgtgcaggtag

SEQ ID NO: 60733 - RNA, 23 nt, Synthetic Construct
  source 1..23: mol_type = other RNA
caaagtgccgttcgtgcaggtag

SEQ ID NO: 60734 - RNA, 20 nt, Synthetic Construct
  source 1..20: mol_type = other RNA
tgaggcagtaggttgtatag

SEQ ID NO: 60735 - RNA, 20 nt, Synthetic Construct
  source 1..20: mol_type = other RNA
cgaggtagtaggttgtgtgg

SEQ ID NO: 60736 - RNA, 22 nt, Synthetic Construct
  source 1..22: mol_type = other RNA
cataaagtagaaagcactacta

SEQ ID NO: 60737 - RNA, 22 nt, Synthetic Construct
  source 1..22: mol_type = other RNA
cataaagtagaaagcactacta

SEQ ID NO: 60738 - RNA, 22 nt, Synthetic Construct
  source 1..22: mol_type = other RNA
tgaggtagtaggttgtatagat

SEQ ID NO: 60739 - RNA, 22 nt, Synthetic Construct
  source 1..22: mol_type = other RNA
tgaggtagtaggttgtatagat

SEQ ID NO: 60740 - RNA, 20 nt, Synthetic Construct
  source 1..20: mol_type = other RNA
taaggtagtaggttgtatag

SEQ ID NO: 60741 - RNA, 22 nt, Synthetic Construct
  source 1..22: mol_type = other RNA
tggggtagtaggttgtatagtt

SEQ ID NO: 60742 - RNA, 22 nt, Synthetic Construct
  source 1..22: mol_type = other RNA
tgaggtagtagtttatgctgtt

SEQ ID NO: 60743 - RNA, 25 nt, Synthetic Construct
  source 1..25: mol_type = other RNA
ccccactgctaaatttgactggctt

SEQ ID NO: 60744 - RNA, 25 nt, Synthetic Construct
  source 1..25: mol_type = other RNA
ccccactgctaaatttgactggctt

SEQ ID NO: 60745 - RNA, 22 nt, Synthetic Construct
  source 1..22: mol_type = other RNA
tagctgcacgtaaatattggcg

SEQ ID NO: 60746 - RNA, 22 nt, Synthetic Construct
  source 1..22: mol_type = other RNA
tagctgcacgtaaatattggcg

SEQ ID NO: 60747 - RNA, 18 nt, Synthetic Construct
  source 1..18: mol_type = other RNA
accctgctcgctgcgcca

SEQ ID NO: 60748 - RNA, 25 nt, Synthetic Construct
  source 1..25: mol_type = other RNA
tcttggagtaggtcattgggtgttt

SEQ ID NO: 60749 - RNA, 23 nt, Synthetic Construct
  source 1..23: mol_type = other RNA
tacagtagtctgcacattggtta

SEQ ID NO: 60750 - RNA, 22 nt, Synthetic Construct
  source 1..22: mol_type = other RNA
tgaggtagcagattgtatagtt

SEQ ID NO: 60751 - RNA, 22 nt, Synthetic Construct
  source 1..22: mol_type = other RNA
tgaggtagcagattgtatagtt

SEQ ID NO: 60752 - RNA, 21 nt, Synthetic Construct
  source 1..21: mol_type = other RNA
tgtagtgtttcctactttatg

SEQ ID NO: 60753 - RNA, 21 nt, Synthetic Construct
  source 1..21: mol_type = other RNA
tgtagtgtttcctactttatg

SEQ ID NO: 60754 - RNA, 22 nt, Synthetic Construct
  source 1..22: mol_type = other RNA
tcgtaccgtgagtaacaatgcg

SEQ ID NO: 60755 - RNA, 22 nt, Synthetic Construct
  source 1..22: mol_type = other RNA
ctttgttcgattccgttgagta

SEQ ID NO: 60756 - RNA, 22 nt, Synthetic Construct
  source 1..22: mol_type = other RNA
ctttgttcgattccgttgagta

SEQ ID NO: 60757 - RNA, 27 nt, Synthetic Construct
  source 1..27: mol_type = other RNA
tcggctgttaaccgaaaggttggtggt

SEQ ID NO: 60758 - RNA, 23 nt, Synthetic Construct
  source 1..23: mol_type = other RNA
tgaggtagtaggttgtgtggctt

SEQ ID NO: 60759 - RNA, 23 nt, Synthetic Construct
  source 1..23: mol_type = other RNA
tgaggtagtaggttgtgtggctt

SEQ ID NO: 60760 - RNA, 22 nt, Synthetic Construct
  source 1..22: mol_type = other RNA
tgaggtagtagtttgtactgtt

SEQ ID NO: 60761 - RNA, 22 nt, Synthetic Construct
  source 1..22: mol_type = other RNA
tgaggtagtagtttgtactgtt

SEQ ID NO: 60762 - RNA, 22 nt, Synthetic Construct
  source 1..22: mol_type = other RNA
tgaggtagtaggttgtgtggat

SEQ ID NO: 60763 - RNA, 20 nt, Synthetic Construct
  source 1..20: mol_type = other RNA
aatgacacgatcactcccgt

SEQ ID NO: 60764 - RNA, 20 nt, Synthetic Construct
  source 1..20: mol_type = other RNA
aatgacacgatcactcccgt

SEQ ID NO: 60765 - RNA, 17 nt, Synthetic Construct
  source 1..17: mol_type = other RNA
cgtgagctgggtttaga

SEQ ID NO: 60766 - RNA, 17 nt, Synthetic Construct
  source 1..17: mol_type = other RNA
cgtgagctgggtttaga

SEQ ID NO: 60767 - RNA, 23 nt, Synthetic Construct
  source 1..23: mol_type = other RNA
ttatggtttgcctgggactgatt

SEQ ID NO: 60768 - RNA, 23 nt, Synthetic Construct
  source 1..23: mol_type = other RNA
ttatggtttgcctgggactgatt

SEQ ID NO: 60769 - RNA, 23 nt, Synthetic Construct
  source 1..23: mol_type = other RNA
tgaggggcagagagcgagactat

SEQ ID NO: 60770 - RNA, 23 nt, Synthetic Construct
  source 1..23: mol_type = other RNA
tgaggggcagagagcgagactat

SEQ ID NO: 60771 - RNA, 22 nt, Synthetic Construct
  source 1..22: mol_type = other RNA
tatatatatatatgtacgtatg

SEQ ID NO: 60772 - RNA, 22 nt, Synthetic Construct
  source 1..22: mol_type = other RNA
tatatatatatatgtacgtatg

SEQ ID NO: 60773 - RNA, 25 nt, Synthetic Construct
  source 1..25: mol_type = other RNA
ttgaggatatgagatcgagacgaca

SEQ ID NO: 60774 - RNA, 21 nt, Synthetic Construct
  source 1..21: mol_type = other RNA
cgtaccgcgagtaataatgcg

SEQ ID NO: 60775 - RNA, 21 nt, Synthetic Construct
  source 1..21: mol_type = other RNA
cgtaccgcgagtaataatgcg

SEQ ID NO: 60776 - RNA, 23 nt, Synthetic Construct
  source 1..23: mol_type = other RNA
tcctgtactgagctgccccgggt

SEQ ID NO: 60777 - RNA, 22 nt, Synthetic Construct
  source 1..22: mol_type = other RNA
taaggtagtaggttgtatagtt

SEQ ID NO: 60778 - RNA, 30 nt, Synthetic Construct; identical to SEQ ID NO: 11302
  source 1..30: mol_type = other RNA

SEQ ID NO: 60779 - RNA, 30 nt, Synthetic Construct; identical to SEQ ID NO: 11302
  source 1..30: mol_type = other RNA

SEQ ID NO: 60780 - RNA, 25 nt, Synthetic Construct
  source 1..25: mol_type = other RNA
gcgccgctggtgtagtggtatcatg

SEQ ID NO: 60781 - RNA, 27 nt, Synthetic Construct
  source 1..27: mol_type = other RNA
cccccccactgctaaatttgactggct

SEQ ID NO: 60782 - RNA, 27 nt, Synthetic Construct
  source 1..27: mol_type = other RNA
cccccccactgctaaatttgactggct

SEQ ID NO: 60783 - RNA, 21 nt, Synthetic Construct
  source 1..21: mol_type = other RNA
cgtaccgtgggtaataatgcg

SEQ ID NO: 60784 - RNA, 21 nt, Synthetic Construct
  source 1..21: mol_type = other RNA
cgtaccgtgggtaataatgcg

SEQ ID NO: 60785 - RNA, 21 nt, Synthetic Construct
  source 1..21: mol_type = other RNA
tgaggtagtaggttgtgtggt

SEQ ID NO: 60786 - RNA, 21 nt, Synthetic Construct
  source 1..21: mol_type = other RNA
tgaggtagtaggttgtgtggt

SEQ ID NO: 60787 - RNA, 20 nt, Synthetic Construct
  source 1..20: mol_type = other RNA
tagcgaaattccttgtcggg

SEQ ID NO: 60788 - RNA, 20 nt, Synthetic Construct
  source 1..20: mol_type = other RNA
tagcgaaattccttgtcggg

SEQ ID NO: 60789 - RNA, 20 nt, Synthetic Construct
  source 1..20: mol_type = other RNA
aatgacacgatcactcccgt

SEQ ID NO: 60790 - RNA, 23 nt, Synthetic Construct
  source 1..23: mol_type = other RNA
tcctgtaccgagctgccccgaga

SEQ ID NO: 60791 - RNA, 22 nt, Synthetic Construct
  source 1..22: mol_type = other RNA
tccttcattccaccggagtctg

SEQ ID NO: 60792 - RNA, 22 nt, Synthetic Construct
  source 1..22: mol_type = other RNA
tccttcattccaccggagtctg

SEQ ID NO: 60793 - RNA, 21 nt, Synthetic Construct
  source 1..21: mol_type = other RNA
tgaggtagtagattgcatagt

SEQ ID NO: 60794 - RNA, 15 nt, Synthetic Construct
  source 1..15: mol_type = other RNA
gacgatcagataccg

SEQ ID NO: 60795 - RNA, 21 nt, Synthetic Construct
  source 1..21: mol_type = other RNA
tggagtgcgacaatggtgttt

SEQ ID NO: 60796 - RNA, 21 nt, Synthetic Construct
  source 1..21: mol_type = other RNA
tggagtgcgacaatggtgttt

SEQ ID NO: 60797 - RNA, 19 nt, Synthetic Construct
  source 1..19: mol_type = other RNA
cctcgtcatctaattagtg

SEQ ID NO: 60798 - RNA, 19 nt, Synthetic Construct
  source 1..19: mol_type = other RNA
cctcgtcatctaattagtg

SEQ ID NO: 60799 - RNA, 17 nt, Synthetic Construct
  source 1..17: mol_type = other RNA
ggagtatggtcgcaagg

SEQ ID NO: 60800 - RNA, 17 nt, Synthetic Construct
  source 1..17: mol_type = other RNA
ggagtatggtcgcaagg

SEQ ID NO: 60801 - RNA, 22 nt, Synthetic Construct
  source 1..22: mol_type = other RNA
tgaggtagcaggttgtatagtt

SEQ ID NO: 60802 - RNA, 22 nt, Synthetic Construct
  source 1..22: mol_type = other RNA
tgaggtagcaggttgtatagtt

SEQ ID NO: 60803 - RNA, 21 nt, Synthetic Construct
  source 1..21: mol_type = other RNA
agctacatctggctactgggt

SEQ ID NO: 60804 - RNA, 21 nt, Synthetic Construct
  source 1..21: mol_type = other RNA
agctacatctggctactgggt

SEQ ID NO: 60805 - RNA, 24 nt, Synthetic Construct
  source 1..24: mol_type = other RNA
tgaggtagtaggttgtgtggtttc

SEQ ID NO: 60806 - RNA, 22 nt, Synthetic Construct
  source 1..22: mol_type = other RNA
tagcagcacggaaatattggcg

SEQ ID NO: 60807 - RNA, 24 nt, Synthetic Construct
  source 1..24: mol_type = other RNA
caacggaatcccaaaagcagctgt

SEQ ID NO: 60808 - RNA, 24 nt, Synthetic Construct
  source 1..24: mol_type = other RNA
caacggaatcccaaaagcagctgt

SEQ ID NO: 60809 - RNA, 15 nt, Synthetic Construct
  source 1..15: mol_type = other RNA
tgcctcagcgtcggt

SEQ ID NO: 60810 - RNA, 15 nt, Synthetic Construct
  source 1..15: mol_type = other RNA
tgcctcagcgtcggt

SEQ ID NO: 60811 - RNA, 23 nt, Synthetic Construct
  source 1..23: mol_type = other RNA
caaagtgttgttcgtgcaggtag

SEQ ID NO: 60812 - RNA, 26 nt, Synthetic Construct
  source 1..26: mol_type = other RNA
ccccccactgctaatttgactggctt

SEQ ID NO: 60813 - RNA, 26 nt, Synthetic Construct
  source 1..26: mol_type = other RNA
ccccccactgctaatttgactggctt

SEQ ID NO: 60814 - RNA, 22 nt, Synthetic Construct
  source 1..22: mol_type = other RNA
ngaggtagtagtttgtgctgtt

SEQ ID NO: 60815 - RNA, 21 nt, Synthetic Construct
  source 1..21: mol_type = other RNA
tgaggtagtggattgtatagt

SEQ ID NO: 60816 - RNA, 21 nt, Synthetic Construct
  source 1..21: mol_type = other RNA
tgaggtagtggattgtatagt

SEQ ID NO: 60817 - RNA, 22 nt, Synthetic Construct
  source 1..22: mol_type = other RNA
tattgcacttgtcctggcctgt

SEQ ID NO: 60818 - RNA, 22 nt, Synthetic Construct
  source 1..22: mol_type = other RNA
tattgcacttgtcctggcctgt

SEQ ID NO: 60819 - RNA, 31 nt, Synthetic Construct; identical to SEQ ID NO: 13805
  source 1..31: mol_type = other RNA

SEQ ID NO: 60820 - RNA, 31 nt, Synthetic Construct; identical to SEQ ID NO: 13805
  source 1..31: mol_type = other RNA

SEQ ID NO: 60821 - RNA, 23 nt, Synthetic Construct
  source 1..23: mol_type = other RNA
caaggtgctgttcgtgcaggtag

SEQ ID NO: 60822 - RNA, 15 nt, Synthetic Construct
  source 1..15: mol_type = other RNA
tagagtagggcggga

SEQ ID NO: 60823 - RNA, 22 nt, Synthetic Construct
  source 1..22: mol_type = other RNA
tattgcacttgtcccggtctgt

SEQ ID NO: 60824 - RNA, 22 nt, Synthetic Construct
  source 1..22: mol_type = other RNA
tattgcacttgtcccggtctgt

SEQ ID NO: 60825 - RNA, 24 nt, Synthetic Construct
  source 1..24: mol_type = other RNA
tgaggtagtaggttgtgtggttgt

SEQ ID NO: 60826 - RNA, 24 nt, Synthetic Construct
  source 1..24: mol_type = other RNA
tgaggtagtaggttgtgtggttgt

SEQ ID NO: 60827 - RNA, 21 nt, Synthetic Construct
  source 1..21: mol_type = other RNA
tgaggtagtaggttgtgcggt

SEQ ID NO: 60828 - RNA, 23 nt, Synthetic Construct
  source 1..23: mol_type = other RNA
actggctagggaaaatgattgga

SEQ ID NO: 60829 - RNA, 23 nt, Synthetic Construct
  source 1..23: mol_type = other RNA
actggctagggaaaatgattgga

SEQ ID NO: 60830 - RNA, 23 nt, Synthetic Construct
  source 1..23: mol_type = other RNA
tccctgtcctccaggagctcacg

SEQ ID NO: 60831 - RNA, 23 nt, Synthetic Construct
  source 1..23: mol_type = other RNA
tccctgtcctccaggagctcacg

SEQ ID NO: 60832 - RNA, 23 nt, Synthetic Construct
  source 1..23: mol_type = other RNA
ttatggtttgcctgggactgatt

SEQ ID NO: 60833 - RNA, 23 nt, Synthetic Construct
  source 1..23: mol_type = other RNA
ttatggtttgcctgggactgatt

SEQ ID NO: 60834 - RNA, 22 nt, Synthetic Construct
  source 1..22: mol_type = other RNA
aggagtgtgacaatggtgtttg

SEQ ID NO: 60835 - RNA, 22 nt, Synthetic Construct
  source 1..22: mol_type = other RNA
aggagtgtgacaatggtgtttg

SEQ ID NO: 60836 - RNA, 26 nt, Synthetic Construct
  source 1..26: mol_type = other RNA
gactcttagcggtggatcactcggct

SEQ ID NO: 60837 - RNA, 26 nt, Synthetic Construct
  source 1..26: mol_type = other RNA
gactcttagcggtggatcactcggct

SEQ ID NO: 60838 - RNA, 23 nt, Synthetic Construct
  source 1..23: mol_type = other RNA
gtaaacatccttgactggaagct

SEQ ID NO: 60839 - RNA, 23 nt, Synthetic Construct
  source 1..23: mol_type = other RNA
gtaaacatccttgactggaagct

SEQ ID NO: 60840 - RNA, 22 nt, Synthetic Construct
  source 1..22: mol_type = other RNA
tgaggtagtaggttatgtggtt

SEQ ID NO: 60841 - RNA, 23 nt, Synthetic Construct
  source 1..23: mol_type = other RNA
caaagtgctgatcgtgcaggtag

SEQ ID NO: 60842 - RNA, 23 nt, Synthetic Construct
  source 1..23: mol_type = other RNA
caaagtgctgatcgtgcaggtag

SEQ ID NO: 60843 - RNA, 22 nt, Synthetic Construct
  source 1..22: mol_type = other RNA
tgaggtagtaggttgtatagta

SEQ ID NO: 60844 - RNA, 22 nt, Synthetic Construct
  source 1..22: mol_type = other RNA
tgaggtagtaggttgtatagta

SEQ ID NO: 60845 - RNA, 22 nt, Synthetic Construct
  source 1..22: mol_type = other RNA
tcgtatcgtgagtaataatgcg

SEQ ID NO: 60846 - RNA, 22 nt, Synthetic Construct
  source 1..22: mol_type = other RNA
tcgtatcgtgagtaataatgcg

SEQ ID NO: 60847 - RNA, 21 nt, Synthetic Construct
  source 1..21: mol_type = other RNA
agctcggtctgaggcccctca

SEQ ID NO: 60848 - RNA, 21 nt, Synthetic Construct
  source 1..21: mol_type = other RNA
agctcggtctgaggcccctca

SEQ ID NO: 60849 - RNA, 18 nt, Synthetic Construct
  source 1..18: mol_type = other RNA
tctaatgagactgccggt

SEQ ID NO: 60850 - RNA, 18 nt, Synthetic Construct
  source 1..18: mol_type = other RNA
tctaatgagactgccggt

SEQ ID NO: 60851 - RNA, 20 nt, Synthetic Construct
  source 1..20: mol_type = other RNA
aacattcaacgctgtcggtg

SEQ ID NO: 60852 - RNA, 20 nt, Synthetic Construct
  source 1..20: mol_type = other RNA
aacattcaacgctgtcggtg

SEQ ID NO: 60853 - RNA, 21 nt, Synthetic Construct
  source 1..21: mol_type = other RNA
gctcgtagttggatcttggga

SEQ ID NO: 60854 - RNA, 31 nt, Synthetic Construct; identical to SEQ ID NO: 1627
  source 1..31: mol_type = other RNA

SEQ ID NO: 60855 - RNA, 31 nt, Synthetic Construct; identical to SEQ ID NO: 1627
  source 1..31: mol_type = other RNA

SEQ ID NO: 60856 - RNA, 16 nt, Synthetic Construct
  source 1..16: mol_type = other RNA
agttgaccgcctgggg

SEQ ID NO: 60857 - RNA, 22 nt, Synthetic Construct
  source 1..22: mol_type = other RNA
tgaggtagtaggttgtattgtt

SEQ ID NO: 60858 - RNA, 22 nt, Synthetic Construct
  source 1..22: mol_type = other RNA
tgaggtagtaggttgtattgtt

SEQ ID NO: 60859 - RNA, 22 nt, Synthetic Construct
  source 1..22: mol_type = other RNA
atataatacaacctgctaagtg

SEQ ID NO: 60860 - RNA, 22 nt, Synthetic Construct
  source 1..22: mol_type = other RNA
atataatacaacctgctaagtg

SEQ ID NO: 60861 - RNA, 27 nt, Synthetic Construct
  source 1..27: mol_type = other RNA
gcgggtgatgcgaactggagtctgagc

SEQ ID NO: 60862 - RNA, 27 nt, Synthetic Construct
  source 1..27: mol_type = other RNA
gcgggtgatgcgaactggagtctgagc

SEQ ID NO: 60863 - RNA, 22 nt, Synthetic Construct
  source 1..22: mol_type = other RNA
tagcagcacgtatatattggcg

SEQ ID NO: 60864 - RNA, 22 nt, Synthetic Construct
  source 1..22: mol_type = other RNA
tagcagcacgtatatattggcg

SEQ ID NO: 60865 - RNA, 19 nt, Synthetic Construct
  source 1..19: mol_type = other RNA
agcgaaattccttgtcggg

SEQ ID NO: 60866 - RNA, 22 nt, Synthetic Construct
  source 1..22: mol_type = other RNA
ttcaagtaatccaggataggct

SEQ ID NO: 60867 - RNA, 16 nt, Synthetic Construct
  source 1..16: mol_type = other RNA
ccatgccgcgtgcggg

SEQ ID NO: 60868 - RNA, 16 nt, Synthetic Construct
  source 1..16: mol_type = other RNA
ccatgccgcgtgcggg

SEQ ID NO: 60869 - RNA, 21 nt, Synthetic Construct
  source 1..21: mol_type = other RNA
tcctgtactgagctaccccga

SEQ ID NO: 60870 - RNA, 21 nt, Synthetic Construct
  source 1..21: mol_type = other RNA
tcctgtactgagctaccccga

SEQ ID NO: 60871 - RNA, 23 nt, Synthetic Construct
  source 1..23: mol_type = other RNA
caaagtgatgttcgtgcaggtag

SEQ ID NO: 60872 - RNA, 23 nt, Synthetic Construct
  source 1..23: mol_type = other RNA
caaagtgatgttcgtgcaggtag

SEQ ID NO: 60873 - RNA, 21 nt, Synthetic Construct
  source 1..21: mol_type = other RNA
tggagtgtgacgatggtgttt

SEQ ID NO: 60874 - RNA, 21 nt, Synthetic Construct
  source 1..21: mol_type = other RNA
tggagtgtgacgatggtgttt

SEQ ID NO: 60875 - RNA, 24 nt, Synthetic Construct
  source 1..24: mol_type = other RNA
tgggtaatacgacgtacttagtgt

SEQ ID NO: 60876 - RNA, 23 nt, Synthetic Construct
  source 1..23: mol_type = other RNA
tgaggtagtaggttgcgtggttt

SEQ ID NO: 60877 - RNA, 23 nt, Synthetic Construct
  source 1..23: mol_type = other RNA
tgaggtagtaggttgcgtggttt

SEQ ID NO: 60878 - RNA, 21 nt, Synthetic Construct
  source 1..21: mol_type = other RNA
tccagtactgagctgccccga

SEQ ID NO: 60879 - RNA, 19 nt, Synthetic Construct
  source 1..19: mol_type = other RNA
cctgtaccgatcaatagtg

SEQ ID NO: 60880 - RNA, 21 nt, Synthetic Construct
  source 1..21: mol_type = other RNA
aagacgggaggaaagaaggga

SEQ ID NO: 60881 - RNA, 31 nt, Synthetic Construct; identical to SEQ ID NO: 2412
  source 1..31: mol_type = other RNA

SEQ ID NO: 60882 - RNA, 31 nt, Synthetic Construct; identical to SEQ ID NO: 2412
  source 1..31: mol_type = other RNA

SEQ ID NO: 60883 - RNA, 23 nt, Synthetic Construct
  source 1..23: mol_type = other RNA
caacggaatcccaaaagcagccg

SEQ ID NO: 60884 - RNA, 23 nt, Synthetic Construct
  source 1..23: mol_type = other RNA
caacggaatcccaaaagcagccg

SEQ ID NO: 60885 - RNA, 22 nt, Synthetic Construct
  source 1..22: mol_type = other RNA
tcctgtattgagctgccccgag

SEQ ID NO: 60886 - RNA, 22 nt, Synthetic Construct
  source 1..22: mol_type = other RNA
tggaatgtaaagaagtatgtaa

SEQ ID NO: 60887 - RNA, 22 nt, Synthetic Construct
  source 1..22: mol_type = other RNA
gcagtagtctgcacattggtta

SEQ ID NO: 60888 - RNA, 22 nt, Synthetic Construct
  source 1..22: mol_type = other RNA
gcagtagtctgcacattggtta

SEQ ID NO: 60889 - RNA, 22 nt, Synthetic Construct
  source 1..22: mol_type = other RNA
tgtgcaaatccatgcaaaactg

SEQ ID NO: 60890 - RNA, 22 nt, Synthetic Construct
  source 1..22: mol_type = other RNA
tgtgcaaatccatgcaaaactg

SEQ ID NO: 60891 - RNA, 23 nt, Synthetic Construct
  source 1..23: mol_type = other RNA
gcctgtactgagctgccccgaga

SEQ ID NO: 60892 - RNA, 23 nt, Synthetic Construct
  source 1..23: mol_type = other RNA
gcctgtactgagctgccccgaga

SEQ ID NO: 60893 - RNA, 18 nt, Synthetic Construct
  source 1..18: mol_type = other RNA
tcgacgctagcggatcct

SEQ ID NO: 60894 - RNA, 18 nt, Synthetic Construct
  source 1..18: mol_type = other RNA
tcgacgctagcggatcct

SEQ ID NO: 60895 - RNA, 22 nt, Synthetic Construct
  source 1..22: mol_type = other RNA
tagcagcacgtagatattggcg

SEQ ID NO: 60896 - RNA, 21 nt, Synthetic Construct
  source 1..21: mol_type = other RNA
cgtaccgtgagcaataatgcg

SEQ ID NO: 60897 - RNA, 19 nt, Synthetic Construct
  source 1..19: mol_type = other RNA
gcccagtgctctgaatgtc

SEQ ID NO: 60898 - RNA, 19 nt, Synthetic Construct
  source 1..19: mol_type = other RNA
gcccagtgctctgaatgtc

SEQ ID NO: 60899 - RNA, 28 nt, Synthetic Construct
  source 1..28: mol_type = other RNA
gcattgtggttcagtggtagaattctcg

SEQ ID NO: 60900 - RNA, 28 nt, Synthetic Construct
  source 1..28: mol_type = other RNA
gcattgtggttcagtggtagaattctcg

SEQ ID NO: 60901 - RNA, 20 nt, Synthetic Construct
  source 1..20: mol_type = other RNA
tgaggtagtaggtcgtatag

SEQ ID NO: 60902 - RNA, 20 nt, Synthetic Construct
  source 1..20: mol_type = other RNA
tgaggtagtaggtcgtatag

SEQ ID NO: 60903 - RNA, 20 nt, Synthetic Construct
  source 1..20: mol_type = other RNA
cccgtgttcggaagattttc

SEQ ID NO: 60904 - RNA, 20 nt, Synthetic Construct
  source 1..20: mol_type = other RNA
cccgtgttcggaagattttc

SEQ ID NO: 60905 - RNA, 22 nt, Synthetic Construct
  source 1..22: mol_type = other RNA
tgaggtagtagtttgcgctgtt

SEQ ID NO: 60906 - RNA, 16 nt, Synthetic Construct
  source 1..16: mol_type = other RNA
accgcttttgtcaggg

SEQ ID NO: 60907 - RNA, 22 nt, Synthetic Construct
  source 1..22: mol_type = other RNA
agagttctacagtccgacgatc

SEQ ID NO: 60908 - RNA, 22 nt, Synthetic Construct
  source 1..22: mol_type = other RNA
agagttctacagtccgacgatc

SEQ ID NO: 60909 - RNA, 19 nt, Synthetic Construct
  source 1..19: mol_type = other RNA
tctaatgagactgccggtg

SEQ ID NO: 60910 - RNA, 22 nt, Synthetic Construct
  source 1..22: mol_type = other RNA
tcccgtactgagctgccccgag

SEQ ID NO: 60911 - RNA, 22 nt, Synthetic Construct
  source 1..22: mol_type = other RNA
tcccgtactgagctgccccgag

SEQ ID NO: 60912 - RNA, 23 nt, Synthetic Construct
  source 1..23: mol_type = other RNA
acagtagtctgcacattggttat

SEQ ID NO: 60913 - RNA, 18 nt, Synthetic Construct
  source 1..18: mol_type = other RNA
gctattgacgaccgtacc

SEQ ID NO: 60914 - RNA, 16 nt, Synthetic Construct
  source 1..16: mol_type = other RNA
gctattgacgaccgta

SEQ ID NO: 60915 - RNA, 18 nt, Synthetic Construct
  source 1..18: mol_type = other RNA
cacagtgtgaatcggcgc

SEQ ID NO: 60916 - RNA, 18 nt, Synthetic Construct
  source 1..18: mol_type = other RNA
cacagtgtgaatcggcgc

SEQ ID NO: 60917 - RNA, 44 nt, Synthetic Construct; identical to SEQ ID NO: 6685
  source 1..44: mol_type = other RNA

SEQ ID NO: 60918 - RNA, 44 nt, Synthetic Construct; identical to SEQ ID NO: 6685
  source 1..44: mol_type = other RNA

SEQ ID NO: 60919 - RNA, 22 nt, Synthetic Construct
  source 1..22: mol_type = other RNA
cgcgacctcagatcagacgtgg

SEQ ID NO: 60920 - RNA, 22 nt, Synthetic Construct
  source 1..22: mol_type = other RNA
cgcgacctcagatcagacgtgg

SEQ ID NO: 60921 - RNA, 21 nt, Synthetic Construct
  source 1..21: mol_type = other RNA
agagttctacagtccgacgat

SEQ ID NO: 60922 - RNA, 21 nt, Synthetic Construct
  source 1..21: mol_type = other RNA
agagttctacagtccgacgat

SEQ ID NO: 60923 - RNA, 22 nt, Synthetic Construct
  source 1..22: mol_type = other RNA
tgaggtagtggtttgtgctgtt

SEQ ID NO: 60924 - RNA, 22 nt, Synthetic Construct
  source 1..22: mol_type = other RNA
ctttgttcgattccgttgagta

SEQ ID NO: 60925 - RNA, 18 nt, Synthetic Construct
  source 1..18: mol_type = other RNA
gcgaaattccttgtcggg

SEQ ID NO: 60926 - RNA, 22 nt, Synthetic Construct
  source 1..22: mol_type = other RNA
tcctgtactgagctgccccaag

SEQ ID NO: 60927 - RNA, 22 nt, Synthetic Construct
  source 1..22: mol_type = other RNA
tcctgtactgagctgccccaag

SEQ ID NO: 60928 - RNA, 22 nt, Synthetic Construct
  source 1..22: mol_type = other RNA
tgaggtagtaggttgtatagtc

SEQ ID NO: 60929 - RNA, 22 nt, Synthetic Construct
  source 1..22: mol_type = other RNA
tgaggtagtaggttgtatagtc

SEQ ID NO: 60930 - RNA, 22 nt, Synthetic Construct
  source 1..22: mol_type = other RNA
tacgcctgtctgagcgtcgctt

SEQ ID NO: 60931 - RNA, 22 nt, Synthetic Construct
  source 1..22: mol_type = other RNA
tacgcctgtctgagcgtcgctt

SEQ ID NO: 60932 - RNA, 30 nt, Synthetic Construct; identical to SEQ ID NO: 2699
  source 1..30: mol_type = other RNA

SEQ ID NO: 60933 - RNA, 30 nt, Synthetic Construct; identical to SEQ ID NO: 2699
  source 1..30: mol_type = other RNA

SEQ ID NO: 60934 - RNA, 22 nt, Synthetic Construct
  source 1..22: mol_type = other RNA
tggagtgtgacaatggcgtttg

SEQ ID NO: 60935 - RNA, 23 nt, Synthetic Construct
  source 1..23: mol_type = other RNA
tcctgtgctgagctgccccgagt

SEQ ID NO: 60936 - RNA, 21 nt, Synthetic Construct
  source 1..21: mol_type = other RNA
tagcagcacgtaatattggcg

SEQ ID NO: 60937 - RNA, 22 nt, Synthetic Construct
  source 1..22: mol_type = other RNA
tgaagtagtaggttgtatagtt

SEQ ID NO: 60938 - RNA, 22 nt, Synthetic Construct
  source 1..22: mol_type = other RNA
tgaagtagtaggttgtatagtt

SEQ ID NO: 60939 - RNA, 20 nt, Synthetic Construct
  source 1..20: mol_type = other RNA
ggtcccaagggtatggctgt

SEQ ID NO: 60940 - RNA, 20 nt, Synthetic Construct
  source 1..20: mol_type = other RNA
ggtcccaagggtatggctgt

SEQ ID NO: 60941 - RNA, 21 nt, Synthetic Construct
  source 1..21: mol_type = other RNA
tagcagcacgtaaatattggc

SEQ ID NO: 60942 - RNA, 21 nt, Synthetic Construct
  source 1..21: mol_type = other RNA
tagcagcacgtaaatattggc

SEQ ID NO: 60943 - RNA, 22 nt, Synthetic Construct
  source 1..22: mol_type = other RNA
aacggaatcccaaaagcagctg

SEQ ID NO: 60944 - RNA, 20 nt, Synthetic Construct
  source 1..20: mol_type = other RNA
tgagatagtaggttgtgtgg

SEQ ID NO: 60945 - RNA, 27 nt, Synthetic Construct
  source 1..27: mol_type = other RNA
ccccccactgctaaatttgaccggctt

SEQ ID NO: 60946 - RNA, 27 nt, Synthetic Construct
  source 1..27: mol_type = other RNA
ccccccactgctaaatttgaccggctt

SEQ ID NO: 60947 - RNA, 20 nt, Synthetic Construct
  source 1..20: mol_type = other RNA
tggctcagttcagcaggaac

SEQ ID NO: 60948 - RNA, 20 nt, Synthetic Construct
  source 1..20: mol_type = other RNA
tggctcagttcagcaggaac

SEQ ID NO: 60949 - RNA, 22 nt, Synthetic Construct
  source 1..22: mol_type = other RNA
tgaggtagtgggttgtgtggtt

SEQ ID NO: 60950 - RNA, 23 nt, Synthetic Construct
  source 1..23: mol_type = other RNA
tcctgtactgggctgccccgaga

SEQ ID NO: 60951 - RNA, 15 nt, Synthetic Construct
  source 1..15: mol_type = other RNA
acccttgtcattagt

SEQ ID NO: 60952 - RNA, 15 nt, Synthetic Construct
  source 1..15: mol_type = other RNA
acccttgtcattagt

SEQ ID NO: 60953 - RNA, 21 nt, Synthetic Construct
  source 1..21: mol_type = other RNA
tggggtagtagattgtatagt

SEQ ID NO: 60954 - RNA, 21 nt, Synthetic Construct
  source 1..21: mol_type = other RNA
aggttccggataagtaagagc

SEQ ID NO: 60955 - RNA, 21 nt, Synthetic Construct
  source 1..21: mol_type = other RNA
aggttccggataagtaagagc

SEQ ID NO: 60956 - RNA, 22 nt, Synthetic Construct
  source 1..22: mol_type = other RNA
ggcagcattgtacagggctatg

SEQ ID NO: 60957 - RNA, 22 nt, Synthetic Construct
  source 1..22: mol_type = other RNA
ggcagcattgtacagggctatg

SEQ ID NO: 60958 - RNA, 23 nt, Synthetic Construct
  source 1..23: mol_type = other RNA
tcccacatggtctagcggttagg

SEQ ID NO: 60959 - RNA, 23 nt, Synthetic Construct
  source 1..23: mol_type = other RNA
tcccacatggtctagcggttagg

SEQ ID NO: 60960 - RNA, 16 nt, Synthetic Construct
  source 1..16: mol_type = other RNA
gggtgaaagcggggga

SEQ ID NO: 60961 - RNA, 21 nt, Synthetic Construct
  source 1..21: mol_type = other RNA
gtacagtactgtgataactga

SEQ ID NO: 60962 - RNA, 21 nt, Synthetic Construct
  source 1..21: mol_type = other RNA
gtacagtactgtgataactga

SEQ ID NO: 60963 - RNA, 21 nt, Synthetic Construct
  source 1..21: mol_type = other RNA
tcaggctcagtcccctcccga

SEQ ID NO: 60964 - RNA, 20 nt, Synthetic Construct
  source 1..20: mol_type = other RNA
tgaggtagtaggtcgtatag

SEQ ID NO: 60965 - RNA, 20 nt, Synthetic Construct
  source 1..20: mol_type = other RNA
tgaggtagtaggtcgtatag

SEQ ID NO: 60966 - RNA, 21 nt, Synthetic Construct
  source 1..21: mol_type = other RNA
tcaggctcagtcccctcccgt

SEQ ID NO: 60967 - RNA, 36 nt, Synthetic Construct; identical to SEQ ID NO: 2248
  source 1..36: mol_type = other RNA

SEQ ID NO: 60968 - RNA, 22 nt, Synthetic Construct
  source 1..22: mol_type = other RNA
tccagtactgagctgccccgag

SEQ ID NO: 60969 - RNA, 22 nt, Synthetic Construct
  source 1..22: mol_type = other RNA
tcgtaccgtgagtgataatgcg

SEQ ID NO: 60970 - RNA, 21 nt, Synthetic Construct
  source 1..21: mol_type = other RNA
agccatcatttaaagaaagcg

SEQ ID NO: 60971 - RNA, 22 nt, Synthetic Construct
  source 1..22: mol_type = other RNA
tgaggtagtagttcgtgctgtt

SEQ ID NO: 60972 - RNA, 22 nt, Synthetic Construct
  source 1..22: mol_type = other RNA
tggagtgtgacaatggcgtttg

SEQ ID NO: 60973 - RNA, 22 nt, Synthetic Construct
  source 1..22: mol_type = other RNA
tggagtgtgacaatggcgtttg

SEQ ID NO: 60974 - RNA, 22 nt, Synthetic Construct
  source 1..22: mol_type = other RNA
tgaggcagtagattgtatagtt

SEQ ID NO: 60975 - RNA, 22 nt, Synthetic Construct
  source 1..22: mol_type = other RNA
tgaggcagtagattgtatagtt

SEQ ID NO: 60976 - RNA, 24 nt, Synthetic Construct
  source 1..24: mol_type = other RNA
gtcagtttgtcaaataccccaatt

SEQ ID NO: 60977 - RNA, 38 nt, Synthetic Construct; identical to SEQ ID NO: 2492
  source 1..38: mol_type = other RNA

SEQ ID NO: 60978 - RNA, 38 nt, Synthetic Construct; identical to SEQ ID NO: 2492
  source 1..38: mol_type = other RNA

SEQ ID NO: 60979 - RNA, 25 nt, Synthetic Construct
  source 1..25: mol_type = other RNA
tgtaaacatccccgactggaagctt

SEQ ID NO: 60980 - RNA, 25 nt, Synthetic Construct
  source 1..25: mol_type = other RNA
tgtaaacatccccgactggaagctt

SEQ ID NO: 60981 - RNA, 23 nt, Synthetic Construct
  source 1..23: mol_type = other RNA
tcctgtactgggctgccccgagt

SEQ ID NO: 60982 - RNA, 23 nt, Synthetic Construct
  source 1..23: mol_type = other RNA
tcctgtactgggctgccccgagt

SEQ ID NO: 60983 - RNA, 22 nt, Synthetic Construct
  source 1..22: mol_type = other RNA
tgaggtagtaggttatatagtt

SEQ ID NO: 60984 - RNA, 22 nt, Synthetic Construct
  source 1..22: mol_type = other RNA
tggcagtgtcttagctggttgt

SEQ ID NO: 60985 - RNA, 22 nt, Synthetic Construct
  source 1..22: mol_type = other RNA
tggcagtgtcttagctggttgt

SEQ ID NO: 60986 - RNA, 23 nt, Synthetic Construct
  source 1..23: mol_type = other RNA
caaagtgttgttcgtgcaggtag

SEQ ID NO: 60987 - RNA, 19 nt, Synthetic Construct
  source 1..19: mol_type = other RNA
gggtgcaagcgttaatcgg

SEQ ID NO: 60988 - RNA, 21 nt, Synthetic Construct
  source 1..21: mol_type = other RNA
cggagtgtgacaatggtgttt

SEQ ID NO: 60989 - RNA, 22 nt, Synthetic Construct
  source 1..22: mol_type = other RNA
tgaggtagtaggttgtatagat

SEQ ID NO: 60990 - RNA, 22 nt, Synthetic Construct
  source 1..22: mol_type = other RNA
tgaggtagtaggttgtatagat

SEQ ID NO: 60991 - RNA, 21 nt, Synthetic Construct
  source 1..21: mol_type = other RNA
ctagactggagctccttgagg

SEQ ID NO: 60992 - RNA, 23 nt, Synthetic Construct
  source 1..23: mol_type = other RNA
ggcagcattgtacagggctatga

SEQ ID NO: 60993 - RNA, 22 nt, Synthetic Construct
  source 1..22: mol_type = other RNA
tgtggtagtagtttgtgctgtt

SEQ ID NO: 60994 - RNA, 22 nt, Synthetic Construct
  source 1..22: mol_type = other RNA
tgaggtagtaggttgtgaggtt

SEQ ID NO: 60995 - RNA, 26 nt, Synthetic Construct
  source 1..26: mol_type = other RNA
tgtccccgcgaggggcccggggcggg

SEQ ID NO: 60996 - RNA, 23 nt, Synthetic Construct
  source 1..23: mol_type = other RNA
tcctgtacagagctgccccgaga

SEQ ID NO: 60997 - RNA, 24 nt, Synthetic Construct
  source 1..24: mol_type = other RNA
tgggtaatacgacgtacttagtgt

SEQ ID NO: 60998 - RNA, 24 nt, Synthetic Construct
  source 1..24: mol_type = other RNA
tgggtaatacgacgtacttagtgt

SEQ ID NO: 60999 - RNA, 32 nt, Synthetic Construct; identical to SEQ ID NO: 7323
  source 1..32: mol_type = other RNA

SEQ ID NO: 61000 - RNA, 32 nt, Synthetic Construct; identical to SEQ ID NO: 7323
  source 1..32: mol_type = other RNA

SEQ ID NO: 61001 - RNA, 22 nt, Synthetic Construct
  source 1..22: mol_type = other RNA
tgaggtagtagtttgtgctgat

SEQ ID NO: 61002 - RNA, 22 nt, Synthetic Construct
  source 1..22: mol_type = other RNA
tcgtaccgtgagaaataatgcg

SEQ ID NO: 61003 - RNA, 22 nt, Synthetic Construct
  source 1..22: mol_type = other RNA
tcgtaccgtgagaaataatgcg

SEQ ID NO: 61004 - RNA, 21 nt, Synthetic Construct
  source 1..21: mol_type = other RNA
tgaggtagtagattgtatggt

SEQ ID NO: 61005 - RNA, 33 nt, Synthetic Construct; identical to SEQ ID NO: 4947
  source 1..33: mol_type = other RNA

SEQ ID NO: 61006 - RNA, 33 nt, Synthetic Construct; identical to SEQ ID NO: 4947
  source 1..33: mol_type = other RNA

SEQ ID NO: 61007 - RNA, 21 nt, Synthetic Construct
  source 1..21: mol_type = other RNA
tggagtgtgacaatggtgctt

SEQ ID NO: 61008 - RNA, 22 nt, Synthetic Construct
  source 1..22: mol_type = other RNA
tgaggtagtaggctgtatagtt

SEQ ID NO: 61009 - RNA, 22 nt, Synthetic Construct
  source 1..22: mol_type = other RNA
tgaggtagtaggctgtatagtt

SEQ ID NO: 61010 - RNA, 28 nt, Synthetic Construct
  source 1..28: mol_type = other RNA
cgactcttagcggtggatcactcggctc

SEQ ID NO: 61011 - RNA, 28 nt, Synthetic Construct
  source 1..28: mol_type = other RNA
cgactcttagcggtggatcactcggctc

SEQ ID NO: 61012 - RNA, 23 nt, Synthetic Construct
  source 1..23: mol_type = other RNA
tgaggtagtaggttgtgtggtat

SEQ ID NO: 61013 - RNA, 22 nt, Synthetic Construct
  source 1..22: mol_type = other RNA
taaggtagtaggttgtgtggtt

SEQ ID NO: 61014 - RNA, 16 nt, Synthetic Construct
  source 1..16: mol_type = other RNA
gggtctgtagctcagt

SEQ ID NO: 61015 - RNA, 22 nt, Synthetic Construct
  source 1..22: mol_type = other RNA
tgtgcaaatccatgcaaaactg

SEQ ID NO: 61016 - RNA, 27 nt, Synthetic Construct
  source 1..27: mol_type = other RNA
ccccccactactaaatttgactggctt

SEQ ID NO: 61017 - RNA, 27 nt, Synthetic Construct
  source 1..27: mol_type = other RNA
ccccccactgctaaatttgactggcat

SEQ ID NO: 61018 - RNA, 35 nt, Synthetic Construct; identical to SEQ ID NO: 1497
  source 1..35: mol_type = other RNA

SEQ ID NO: 61019 - RNA, 20 nt, Synthetic Construct
  source 1..20: mol_type = other RNA
tgaggtagtaagttgtattg

SEQ ID NO: 61020 - RNA, 20 nt, Synthetic Construct
  source 1..20: mol_type = other RNA
tgaggtagtaagttgtattg

SEQ ID NO: 61021 - RNA, 20 nt, Synthetic Construct
  source 1..20: mol_type = other RNA
tgaggaagtaggttgtgtgg

SEQ ID NO: 61022 - RNA, 20 nt, Synthetic Construct
  source 1..20: mol_type = other RNA
tgaggaagtaggttgtgtgg

SEQ ID NO: 61023 - RNA, 20 nt, Synthetic Construct
  source 1..20: mol_type = other RNA
tagaattctcgcctgccacg

SEQ ID NO: 61024 - RNA, 21 nt, Synthetic Construct
  source 1..21: mol_type = other RNA
tcctgtactgagctaccccga

SEQ ID NO: 61025 - RNA, 27 nt, Synthetic Construct
  source 1..27: mol_type = other RNA
ccccccactgctagatttgactggctt

SEQ ID NO: 61026 - RNA, 27 nt, Synthetic Construct
  source 1..27: mol_type = other RNA
ccccccactgctagatttgactggctt

SEQ ID NO: 61027 - RNA, 36 nt, Synthetic Construct; identical to SEQ ID NO: 2456
  source 1..36: mol_type = other RNA

SEQ ID NO: 61028 - RNA, 36 nt, Synthetic Construct; identical to SEQ ID NO: 2456
  source 1..36: mol_type = other RNA

SEQ ID NO: 61029 - RNA, 27 nt, Synthetic Construct
  source 1..27: mol_type = other RNA
ccccccactgcaaaatttgactggctt

SEQ ID NO: 61030 - RNA, 27 nt, Synthetic Construct
  source 1..27: mol_type = other RNA
ccccccactgcaaaatttgactggctt

SEQ ID NO: 61031 - RNA, 22 nt, Synthetic Construct
  source 1..22: mol_type = other RNA
tgaggtagcagtttgtgctgtt

SEQ ID NO: 61032 - RNA, 22 nt, Synthetic Construct
  source 1..22: mol_type = other RNA
tagcagtacgtaaatattggcg

SEQ ID NO: 61033 - RNA, 22 nt, Synthetic Construct
  source 1..22: mol_type = other RNA
tagcagtacgtaaatattggcg

SEQ ID NO: 61034 - RNA, 24 nt, Synthetic Construct
  source 1..24: mol_type = other RNA
acagtagtctgcacattggttatt

SEQ ID NO: 61035 - RNA, 25 nt, Synthetic Construct
  source 1..25: mol_type = other RNA
gactcttagcggtggatcactcggc

SEQ ID NO: 61036 - RNA, 25 nt, Synthetic Construct
  source 1..25: mol_type = other RNA
gactcttagcggtggatcactcggc

SEQ ID NO: 61037 - RNA, 22 nt, Synthetic Construct
  source 1..22: mol_type = other RNA
tagcagcacgtaaatattggca

SEQ ID NO: 61038 - RNA, 22 nt, Synthetic Construct
  source 1..22: mol_type = other RNA
ggcagcattgtacagggctatg

SEQ ID NO: 61039 - RNA, 22 nt, Synthetic Construct
  source 1..22: mol_type = other RNA
ggcagcattgtacagggctatg

SEQ ID NO: 61040 - RNA, 22 nt, Synthetic Construct
  source 1..22: mol_type = other RNA
tcgtgccgtgagtaataatgcg

SEQ ID NO: 61041 - RNA, 15 nt, Synthetic Construct
  source 1..15: mol_type = other RNA
acccttgtcattagt

SEQ ID NO: 61042 - RNA, 15 nt, Synthetic Construct
  source 1..15: mol_type = other RNA
acccttgtcattagt

SEQ ID NO: 61043 - RNA, 22 nt, Synthetic Construct
  source 1..22: mol_type = other RNA
tagcagcacgtaaatgttggcg

SEQ ID NO: 61044 - RNA, 20 nt, Synthetic Construct
  source 1..20: mol_type = other RNA
tgaggtagtaggctgtatag

SEQ ID NO: 61045 - RNA, 20 nt, Synthetic Construct
  source 1..20: mol_type = other RNA
tgaggtagtaggctgtatag

SEQ ID NO: 61046 - RNA, 20 nt, Synthetic Construct
  source 1..20: mol_type = other RNA
tgaggtagcaggttgtatag

SEQ ID NO: 61047 - RNA, 22 nt, Synthetic Construct
  source 1..22: mol_type = other RNA
tagcagcacgtaaatgttggcg

SEQ ID NO: 61048 - RNA, 25 nt, Synthetic Construct
  source 1..25: mol_type = other RNA
ggtaaaatagctgagtgaagcattg

SEQ ID NO: 61049 - RNA, 25 nt, Synthetic Construct
  source 1..25: mol_type = other RNA
ggtaaaatagctgagtgaagcattg

SEQ ID NO: 61050 - RNA, 21 nt, Synthetic Construct
  source 1..21: mol_type = other RNA
tggagtgtggcaatggtgttt

SEQ ID NO: 61051 - RNA, 21 nt, Synthetic Construct
  source 1..21: mol_type = other RNA
tggagtgtggcaatggtgttt

SEQ ID NO: 61052 - RNA, 23 nt, Synthetic Construct
  source 1..23: mol_type = other RNA
ttggtccccttcaaccagctgtt

SEQ ID NO: 61053 - RNA, 23 nt, Synthetic Construct
  source 1..23: mol_type = other RNA
ttggtccccttcaaccagctgtt

SEQ ID NO: 61054 - RNA, 21 nt, Synthetic Construct
  source 1..21: mol_type = other RNA
tgaggggcagagagcgagacc

SEQ ID NO: 61055 - RNA, 21 nt, Synthetic Construct
  source 1..21: mol_type = other RNA
tgaggggcagagagcgagacc

SEQ ID NO: 61056 - RNA, 22 nt, Synthetic Construct
  source 1..22: mol_type = other RNA
tagcagcacgtaaaaattggcg

SEQ ID NO: 61057 - RNA, 22 nt, Synthetic Construct
  source 1..22: mol_type = other RNA
tagcagcacgtaaaaattggcg

SEQ ID NO: 61058 - RNA, 28 nt, Synthetic Construct
  source 1..28: mol_type = other RNA
ccccccactgctaaatttgaccggcttt

SEQ ID NO: 61059 - RNA, 23 nt, Synthetic Construct
  source 1..23: mol_type = other RNA
atgtcccacccccactcctgttt

SEQ ID NO: 61060 - RNA, 23 nt, Synthetic Construct
  source 1..23: mol_type = other RNA
atgtcccacccccactcctgttt

SEQ ID NO: 61061 - RNA, 22 nt, Synthetic Construct
  source 1..22: mol_type = other RNA
atggatttttggagcagggaga

SEQ ID NO: 61062 - RNA, 21 nt, Synthetic Construct
  source 1..21: mol_type = other RNA
cgtaccgtgagcaataatgcg

SEQ ID NO: 61063 - RNA, 21 nt, Synthetic Construct
  source 1..21: mol_type = other RNA
tgaggggcagagagcgaggct

SEQ ID NO: 61064 - RNA, 20 nt, Synthetic Construct
  source 1..20: mol_type = other RNA
tagcagcacataatggtttg

SEQ ID NO: 61065 - RNA, 20 nt, Synthetic Construct
  source 1..20: mol_type = other RNA
tagcagcacataatggtttg

SEQ ID NO: 61066 - RNA, 29 nt, Synthetic Construct
  source 1..29: mol_type = other RNA
gcatgggtggttcagtggtagaattctcg

SEQ ID NO: 61067 - RNA, 29 nt, Synthetic Construct
  source 1..29: mol_type = other RNA
gcatgggtggttcagtggtagaattctcg

SEQ ID NO: 61068 - RNA, 22 nt, Synthetic Construct
  source 1..22: mol_type = other RNA
tgagaactgaattccatgggtc

SEQ ID NO: 61069 - RNA, 22 nt, Synthetic Construct
  source 1..22: mol_type = other RNA
tgagaactgaattccatgggtc

SEQ ID NO: 61070 - RNA, 29 nt, Synthetic Construct
  source 1..29: mol_type = other RNA
gagcgctgagaagacggtcgaacttgact

SEQ ID NO: 61071 - RNA, 27 nt, Synthetic Construct
  source 1..27: mol_type = other RNA
ccccccgctgctaaatttgactggctt

SEQ ID NO: 61072 - RNA, 27 nt, Synthetic Construct
  source 1..27: mol_type = other RNA
ccccccgctgctaaatttgactggctt

SEQ ID NO: 61073 - RNA, 15 nt, Synthetic Construct
  source 1..15: mol_type = other RNA
gctagtaatcgcgga

SEQ ID NO: 61074 - RNA, 23 nt, Synthetic Construct
  source 1..23: mol_type = other RNA
tgaggtagtgggttgtgtggttt

SEQ ID NO: 61075 - RNA, 23 nt, Synthetic Construct
  source 1..23: mol_type = other RNA
tgaggtagtgggttgtgtggttt

SEQ ID NO: 61076 - RNA, 35 nt, Synthetic Construct; identical to SEQ ID NO: 2615
  source 1..35: mol_type = other RNA

SEQ ID NO: 61077 - RNA, 22 nt, Synthetic Construct
  source 1..22: mol_type = other RNA
tagcagcacggaaatattggcg

SEQ ID NO: 61078 - RNA, 22 nt, Synthetic Construct
  source 1..22: mol_type = other RNA
tagcagcacggaaatattggcg

SEQ ID NO: 61079 - RNA, 20 nt, Synthetic Construct
  source 1..20: mol_type = other RNA
tgaggtagtaggttgtacag

SEQ ID NO: 61080 - RNA, 22 nt, Synthetic Construct
  source 1..22: mol_type = other RNA
cgtaccgtgagtaataatgcga

SEQ ID NO: 61081 - RNA, 22 nt, Synthetic Construct
  source 1..22: mol_type = other RNA
cgtaccgtgagtaataatgcga

SEQ ID NO: 61082 - RNA, 26 nt, Synthetic Construct
  source 1..26: mol_type = other RNA
ggcgcttgagagaactctggagaagg

SEQ ID NO: 61083 - RNA, 26 nt, Synthetic Construct
  source 1..26: mol_type = other RNA
ggcgcttgagagaactctggagaagg

SEQ ID NO: 61084 - RNA, 22 nt, Synthetic Construct
  source 1..22: mol_type = other RNA
tgaggtagtagtttgagctgtt

SEQ ID NO: 61085 - RNA, 22 nt, Synthetic Construct
  source 1..22: mol_type = other RNA
tgaggtagtagtttgagctgtt

SEQ ID NO: 61086 - RNA, 22 nt, Synthetic Construct
  source 1..22: mol_type = other RNA
tagcagcacgtaaatattggca

SEQ ID NO: 61087 - RNA, 23 nt, Synthetic Construct
  source 1..23: mol_type = other RNA
ttcaagtaatccaggataggctt

SEQ ID NO: 61088 - RNA, 17 nt, Synthetic Construct
  source 1..17: mol_type = other RNA
gcggctgtagctcagtt

SEQ ID NO: 61089 - RNA, 17 nt, Synthetic Construct
  source 1..17: mol_type = other RNA
gcggctgtagctcagtt

SEQ ID NO: 61090 - RNA, 22 nt, Synthetic Construct
  source 1..22: mol_type = other RNA
tggagtgtggcaatggtgtttg

SEQ ID NO: 61091 - RNA, 21 nt, Synthetic Construct
  source 1..21: mol_type = other RNA
ttataaagcaatgagactgat

SEQ ID NO: 61092 - RNA, 21 nt, Synthetic Construct
  source 1..21: mol_type = other RNA
ttataaagcaatgagactgat

SEQ ID NO: 61093 - RNA, 21 nt, Synthetic Construct
  source 1..21: mol_type = other RNA
tgaggcagtaggttgtatagt

SEQ ID NO: 61094 - RNA, 32 nt, Synthetic Construct; identical to SEQ ID NO: 37450
  source 1..32: mol_type = other RNA

SEQ ID NO: 61095 - RNA, 30 nt, Synthetic Construct; identical to SEQ ID NO: 10539
  source 1..30: mol_type = other RNA

SEQ ID NO: 61096 - RNA, 30 nt, Synthetic Construct; identical to SEQ ID NO: 10539
  source 1..30: mol_type = other RNA

SEQ ID NO: 61097 - RNA, 25 nt, Synthetic Construct
  source 1..25: mol_type = other RNA
ttcaagtaatccaggataggctttt

SEQ ID NO: 61098 - RNA, 21 nt, Synthetic Construct
  source 1..21: mol_type = other RNA
cgcgacctcagatcagacgtg

SEQ ID NO: 61099 - RNA, 21 nt, Synthetic Construct
  source 1..21: mol_type = other RNA
taggtagtttcctgttgttgg

SEQ ID NO: 61100 - RNA, 18 nt, Synthetic Construct
  source 1..18: mol_type = other RNA
cataaagtagaaagcact

SEQ ID NO: 61101 - RNA, 23 nt, Synthetic Construct
  source 1..23: mol_type = other RNA
tattgcacttgtcccggcctgta

SEQ ID NO: 61102 - RNA, 20 nt, Synthetic Construct
  source 1..20: mol_type = other RNA
gagtaggacgttgccaggtt

SEQ ID NO: 61103 - RNA, 20 nt, Synthetic Construct
  source 1..20: mol_type = other RNA
gagtaggacgttgccaggtt

SEQ ID NO: 61104 - RNA, 27 nt, Synthetic Construct
  source 1..27: mol_type = other RNA
ccccccactgctaaatttgactggcct

SEQ ID NO: 61105 - RNA, 27 nt, Synthetic Construct
  source 1..27: mol_type = other RNA
ccccccactgctaaatttgactggcct

SEQ ID NO: 61106 - RNA, 19 nt, Synthetic Construct
  source 1..19: mol_type = other RNA
cgcgacctcagatcagacg

SEQ ID NO: 61107 - RNA, 19 nt, Synthetic Construct
  source 1..19: mol_type = other RNA
cgcgacctcagatcagacg

SEQ ID NO: 61108 - RNA, 27 nt, Synthetic Construct
  source 1..27: mol_type = other RNA
gctttacattggactttgaacagatct

SEQ ID NO: 61109 - RNA, 16 nt, Synthetic Construct
  source 1..16: mol_type = other RNA
gagctgtggatagggg

SEQ ID NO: 61110 - RNA, 16 nt, Synthetic Construct
  source 1..16: mol_type = other RNA
gagctgtggatagggg

SEQ ID NO: 61111 - RNA, 28 nt, Synthetic Construct
  source 1..28: mol_type = other RNA
ccccccgctgctaaatttgactggcttt

SEQ ID NO: 61112 - RNA, 28 nt, Synthetic Construct
  source 1..28: mol_type = other RNA
ccccccgctgctaaatttgactggcttt

SEQ ID NO: 61113 - RNA, 22 nt, Synthetic Construct
  source 1..22: mol_type = other RNA
ggaggtagtagtttgtgctgtt

SEQ ID NO: 61114 - RNA, 22 nt, Synthetic Construct
  source 1..22: mol_type = other RNA
ggaggtagtagtttgtgctgtt

SEQ ID NO: 61115 - RNA, 23 nt, Synthetic Construct
  source 1..23: mol_type = other RNA
tgtgactggttgaccagaggggt

SEQ ID NO: 61116 - RNA, 20 nt, Synthetic Construct
  source 1..20: mol_type = other RNA
tgaggtagtaggttgcatag

SEQ ID NO: 61117 - RNA, 16 nt, Synthetic Construct
  source 1..16: mol_type = other RNA
agttgaccgcctgggg

SEQ ID NO: 61118 - RNA, 16 nt, Synthetic Construct
  source 1..16: mol_type = other RNA
agttgaccgcctgggg

SEQ ID NO: 61119 - RNA, 18 nt, Synthetic Construct
  source 1..18: mol_type = other RNA
tgcgtagatatgcggagg

SEQ ID NO: 61120 - RNA, 22 nt, Synthetic Construct
  source 1..22: mol_type = other RNA
tgagaactgaattccgtgggtt

SEQ ID NO: 61121 - RNA, 22 nt, Synthetic Construct
  source 1..22: mol_type = other RNA
tgagaactgaattccgtgggtt

SEQ ID NO: 61122 - RNA, 21 nt, Synthetic Construct
  source 1..21: mol_type = other RNA
tcctgcactgagctgccccga

SEQ ID NO: 61123 - RNA, 30 nt, Synthetic Construct; identical to SEQ ID NO: 344
  source 1..30: mol_type = other RNA

SEQ ID NO: 61124 - RNA, 21 nt, Synthetic Construct
  source 1..21: mol_type = other RNA
gaagaggacttggaactcgat

SEQ ID NO: 61125 - RNA, 21 nt, Synthetic Construct
  source 1..21: mol_type = other RNA
gaagaggacttggaactcgat

SEQ ID NO: 61126 - RNA, 24 nt, Synthetic Construct
  source 1..24: mol_type = other RNA
aaaccgttaccattactgagttta

SEQ ID NO: 61127 - RNA, 22 nt, Synthetic Construct
  source 1..22: mol_type = other RNA
tcctgtactgagttgccccgag

SEQ ID NO: 61128 - RNA, 31 nt, Synthetic Construct; identical to SEQ ID NO: 2147
  source 1..31: mol_type = other RNA

SEQ ID NO: 61129 - RNA, 31 nt, Synthetic Construct; identical to SEQ ID NO: 2147
  source 1..31: mol_type = other RNA

SEQ ID NO: 61130 - RNA, 22 nt, Synthetic Construct
  source 1..22: mol_type = other RNA
ttgcagcacgtaaatattggcg

SEQ ID NO: 61131 - RNA, 21 nt, Synthetic Construct
  source 1..21: mol_type = other RNA
tcctgtactgggctgccccga

SEQ ID NO: 61132 - RNA, 22 nt, Synthetic Construct
  source 1..22: mol_type = other RNA
tcctgtactgagttgccccgag

SEQ ID NO: 61133 - RNA, 19 nt, Synthetic Construct
  source 1..19: mol_type = other RNA
tcctgtaccgatcaatagt

SEQ ID NO: 61134 - RNA, 19 nt, Synthetic Construct
  source 1..19: mol_type = other RNA
tcctgtaccgatcaatagt

SEQ ID NO: 61135 - RNA, 21 nt, Synthetic Construct
  source 1..21: mol_type = other RNA
aaaagctgggttgagagggcg

SEQ ID NO: 61136 - RNA, 27 nt, Synthetic Construct
  source 1..27: mol_type = other RNA
ccccctactgctaaatttgactggctt

SEQ ID NO: 61137 - RNA, 19 nt, Synthetic Construct
  source 1..19: mol_type = other RNA
tacagtatagatgatgtac

SEQ ID NO: 61138 - RNA, 23 nt, Synthetic Construct
  source 1..23: mol_type = other RNA
actcggcgtggcgtcggtcgtgt

SEQ ID NO: 61139 - RNA, 23 nt, Synthetic Construct
  source 1..23: mol_type = other RNA
actcggcgtggcgtcggtcgtgt

SEQ ID NO: 61140 - RNA, 24 nt, Synthetic Construct
  source 1..24: mol_type = other RNA
tataccgaagctctaggtgcggca

SEQ ID NO: 61141 - RNA, 24 nt, Synthetic Construct
  source 1..24: mol_type = other RNA
tataccgaagctctaggtgcggca

SEQ ID NO: 61142 - RNA, 23 nt, Synthetic Construct
  source 1..23: mol_type = other RNA
tgtaaacatccttgactggaagc

SEQ ID NO: 61143 - RNA, 23 nt, Synthetic Construct
  source 1..23: mol_type = other RNA
tgtaaacatccttgactggaagc

SEQ ID NO: 61144 - RNA, 34 nt, Synthetic Construct; identical to SEQ ID NO: 35301
  source 1..34: mol_type = other RNA

SEQ ID NO: 61145 - RNA, 34 nt, Synthetic Construct; identical to SEQ ID NO: 35301
  source 1..34: mol_type = other RNA

SEQ ID NO: 61146 - RNA, 23 nt, Synthetic Construct
  source 1..23: mol_type = other RNA
ggatatcatcatatactgtaagt

SEQ ID NO: 61147 - RNA, 23 nt, Synthetic Construct
  source 1..23: mol_type = other RNA
tgaggtagtaggttgtatagttg

SEQ ID NO: 61148 - RNA, 23 nt, Synthetic Construct
  source 1..23: mol_type = other RNA
tgaggtagtaggttgtatagttg

SEQ ID NO: 61149 - RNA, 25 nt, Synthetic Construct
  source 1..25: mol_type = other RNA
agctacattgtctgctgggtttctt

SEQ ID NO: 61150 - RNA, 25 nt, Synthetic Construct
  source 1..25: mol_type = other RNA
agctacattgtctgctgggtttctt

SEQ ID NO: 61151 - RNA, 22 nt, Synthetic Construct
  source 1..22: mol_type = other RNA
tagcagcatgtaaatattggcg

SEQ ID NO: 61152 - RNA, 22 nt, Synthetic Construct
  source 1..22: mol_type = other RNA
cattgcacttgtctcggtctgg

SEQ ID NO: 61153 - RNA, 16 nt, Synthetic Construct
  source 1..16: mol_type = other RNA
aggtcatcgtcaggct

SEQ ID NO: 61154 - RNA, 19 nt, Synthetic Construct
  source 1..19: mol_type = other RNA
cttggggttgtaggaccac

SEQ ID NO: 61155 - RNA, 19 nt, Synthetic Construct
  source 1..19: mol_type = other RNA
cttggggttgtaggaccac

SEQ ID NO: 61156 - RNA, 23 nt, Synthetic Construct
  source 1..23: mol_type = other RNA
tgtcagtttgtcaaataccccag

SEQ ID NO: 61157 - RNA, 22 nt, Synthetic Construct
  source 1..22: mol_type = other RNA
tagcttatcagactgatgttgg

SEQ ID NO: 61158 - RNA, 22 nt, Synthetic Construct
  source 1..22: mol_type = other RNA
tagcttatcagactgatgttgg

SEQ ID NO: 61159 - RNA, 23 nt, Synthetic Construct
  source 1..23: mol_type = other RNA
caaagtgctgttcgtgcaggtaa

SEQ ID NO: 61160 - RNA, 22 nt, Synthetic Construct
  source 1..22: mol_type = other RNA
tgaggtagtaggctgtatagtt

SEQ ID NO: 61161 - RNA, 22 nt, Synthetic Construct
  source 1..22: mol_type = other RNA
tgaggtagtaggctgtatagtt

SEQ ID NO: 61162 - RNA, 16 nt, Synthetic Construct
  source 1..16: mol_type = other RNA
taacaggtctgtgatg

SEQ ID NO: 61163 - RNA, 16 nt, Synthetic Construct
  source 1..16: mol_type = other RNA
taacaggtctgtgatg

SEQ ID NO: 61164 - RNA, 22 nt, Synthetic Construct
  source 1..22: mol_type = other RNA
tgaggtagtagattgtagagtt

SEQ ID NO: 61165 - RNA, 22 nt, Synthetic Construct
  source 1..22: mol_type = other RNA
tgaggtagtagattgtagagtt

SEQ ID NO: 61166 - RNA, 18 nt, Synthetic Construct
  source 1..18: mol_type = other RNA
gtctgcctcagcgtcggt

SEQ ID NO: 61167 - RNA, 18 nt, Synthetic Construct
  source 1..18: mol_type = other RNA
gtctgcctcagcgtcggt

SEQ ID NO: 61168 - RNA, 22 nt, Synthetic Construct
  source 1..22: mol_type = other RNA
tagcagcacgtaaagattggcg

SEQ ID NO: 61169 - RNA, 22 nt, Synthetic Construct
  source 1..22: mol_type = other RNA
tagcagcacgtaaagattggcg

SEQ ID NO: 61170 - RNA, 22 nt, Synthetic Construct
  source 1..22: mol_type = other RNA
tgaggtagtaggttgtattgtt

SEQ ID NO: 61171 - RNA, 22 nt, Synthetic Construct
  source 1..22: mol_type = other RNA
tgaggtagtaggttgtattgtt

SEQ ID NO: 61172 - RNA, 21 nt, Synthetic Construct
  source 1..21: mol_type = other RNA
cactgatcgagtcgtcctgcg

SEQ ID NO: 61173 - RNA, 21 nt, Synthetic Construct
  source 1..21: mol_type = other RNA
cactgatcgagtcgtcctgcg

SEQ ID NO: 61174 - RNA, 24 nt, Synthetic Construct
  source 1..24: mol_type = other RNA
tgaggtagtaggttgtgtggtttc

SEQ ID NO: 61175 - RNA, 22 nt, Synthetic Construct
  source 1..22: mol_type = other RNA
gtgaggtagtaggttgtatagt

SEQ ID NO: 61176 - RNA, 23 nt, Synthetic Construct
  source 1..23: mol_type = other RNA
tgtcagcttgtcaaataccccaa

SEQ ID NO: 61177 - RNA, 22 nt, Synthetic Construct
  source 1..22: mol_type = other RNA
tagcagcaggtaaatattggcg

SEQ ID NO: 61178 - RNA, 23 nt, Synthetic Construct
  source 1..23: mol_type = other RNA
tcaggctcagtcccctcccgttt

SEQ ID NO: 61179 - RNA, 23 nt, Synthetic Construct
  source 1..23: mol_type = other RNA
tcaggctcagtcccctcccgttt

SEQ ID NO: 61180 - RNA, 24 nt, Synthetic Construct
  source 1..24: mol_type = other RNA
tgaggtagtaggttgtgtggttta

SEQ ID NO: 61181 - RNA, 24 nt, Synthetic Construct
  source 1..24: mol_type = other RNA
tgaggtagtaggttgtgtggttta

SEQ ID NO: 61182 - RNA, 23 nt, Synthetic Construct
  source 1..23: mol_type = other RNA
tctacagtgcacgtgtctccagt

SEQ ID NO: 61183 - RNA, 23 nt, Synthetic Construct
  source 1..23: mol_type = other RNA
tctacagtgcacgtgtctccagt

SEQ ID NO: 61184 - RNA, 29 nt, Synthetic Construct
  source 1..29: mol_type = other RNA
gcgccgctggtgtagtggtatcatgcaag

SEQ ID NO: 61185 - RNA, 29 nt, Synthetic Construct
  source 1..29: mol_type = other RNA
gcgccgctggtgtagtggtatcatgcaag

SEQ ID NO: 61186 - RNA, 31 nt, Synthetic Construct; identical to SEQ ID NO: 9212
  source 1..31: mol_type = other RNA

SEQ ID NO: 61187 - RNA, 31 nt, Synthetic Construct; identical to SEQ ID NO: 9212
  source 1..31: mol_type = other RNA

SEQ ID NO: 61188 - RNA, 22 nt, Synthetic Construct
  source 1..22: mol_type = other RNA
tatcgcacttgtcccggcctgt

SEQ ID NO: 61189 - RNA, 22 nt, Synthetic Construct
  source 1..22: mol_type = other RNA
tatcgcacttgtcccggcctgt

SEQ ID NO: 61190 - RNA, 27 nt, Synthetic Construct
  source 1..27: mol_type = other RNA
ccccccactgctaaatttgacaggctt

SEQ ID NO: 61191 - RNA, 27 nt, Synthetic Construct
  source 1..27: mol_type = other RNA
ccccccactgctaaatttgacaggctt

SEQ ID NO: 61192 - RNA, 22 nt, Synthetic Construct
  source 1..22: mol_type = other RNA
accacagggtagaaccacggaa

SEQ ID NO: 61193 - RNA, 22 nt, Synthetic Construct
  source 1..22: mol_type = other RNA
accacagggtagaaccacggaa

SEQ ID NO: 61194 - RNA, 22 nt, Synthetic Construct
  source 1..22: mol_type = other RNA
tgaggtagtagtttgagctgtt

SEQ ID NO: 61195 - RNA, 22 nt, Synthetic Construct
  source 1..22: mol_type = other RNA
tgaggtagtagtttgagctgtt

SEQ ID NO: 61196 - RNA, 17 nt, Synthetic Construct
  source 1..17: mol_type = other RNA
cagagacgagtcgacca

SEQ ID NO: 61197 - RNA, 24 nt, Synthetic Construct
  source 1..24: mol_type = other RNA
tgtaaacgtccccgactggaagct

SEQ ID NO: 61198 - RNA, 24 nt, Synthetic Construct
  source 1..24: mol_type = other RNA
tgtaaacgtccccgactggaagct

SEQ ID NO: 61199 - RNA, 23 nt, Synthetic Construct
  source 1..23: mol_type = other RNA
tggctcagttcagcaggaacagt

SEQ ID NO: 61200 - RNA, 22 nt, Synthetic Construct
  source 1..22: mol_type = other RNA
tcctgtactgagctgtcccgag

SEQ ID NO: 61201 - RNA, 23 nt, Synthetic Construct
  source 1..23: mol_type = other RNA
tggtaaaacgacgtacttagtgt

SEQ ID NO: 61202 - RNA, 23 nt, Synthetic Construct
  source 1..23: mol_type = other RNA
tggtaaaacgacgtacttagtgt

SEQ ID NO: 61203 - RNA, 32 nt, Synthetic Construct; identical to SEQ ID NO: 1238
  source 1..32: mol_type = other RNA

SEQ ID NO: 61204 - RNA, 22 nt, Synthetic Construct
  source 1..22: mol_type = other RNA
tcctgtactgagttgccccgag

SEQ ID NO: 61205 - RNA, 21 nt, Synthetic Construct
  source 1..21: mol_type = other RNA
tgaggtagaagattgtatagt

SEQ ID NO: 61206 - RNA, 21 nt, Synthetic Construct
  source 1..21: mol_type = other RNA
tgaggtagaagattgtatagt

SEQ ID NO: 61207 - RNA, 21 nt, Synthetic Construct
  source 1..21: mol_type = other RNA
cagtgcaatgttaaaagggca

SEQ ID NO: 61208 - RNA, 21 nt, Synthetic Construct
  source 1..21: mol_type = other RNA
cagtgcaatgttaaaagggca

SEQ ID NO: 61209 - RNA, 41 nt, Synthetic Construct; identical to SEQ ID NO: 781
  source 1..41: mol_type = other RNA

SEQ ID NO: 61210 - RNA, 41 nt, Synthetic Construct; identical to SEQ ID NO: 781
  source 1..41: mol_type = other RNA

SEQ ID NO: 61211 - RNA, 23 nt, Synthetic Construct
  source 1..23: mol_type = other RNA
tcttggagtaggtcattgggtgt

SEQ ID NO: 61212 - RNA, 23 nt, Synthetic Construct
  source 1..23: mol_type = other RNA
caacggaatcccaaaagcagctt

SEQ ID NO: 61213 - RNA, 23 nt, Synthetic Construct
  source 1..23: mol_type = other RNA
caacggaatcccaaaagcagctt

SEQ ID NO: 61214 - RNA, 21 nt, Synthetic Construct
  source 1..21: mol_type = other RNA
tgaggtagtagattgtgtagt

SEQ ID NO: 61215 - RNA, 20 nt, Synthetic Construct
  source 1..20: mol_type = other RNA
tgaggtagtaggtcgtgtgg

SEQ ID NO: 61216 - RNA, 35 nt, Synthetic Construct; identical to SEQ ID NO: 19298
  source 1..35: mol_type = other RNA

SEQ ID NO: 61217 - RNA, 33 nt, Synthetic Construct; identical to SEQ ID NO: 2253
  source 1..33: mol_type = other RNA

SEQ ID NO: 61218 - RNA, 32 nt, Synthetic Construct; identical to SEQ ID NO: 14097
  source 1..32: mol_type = other RNA

SEQ ID NO: 61219 - RNA, 21 nt, Synthetic Construct
  source 1..21: mol_type = other RNA
tgtgactggttgaccagaggg

SEQ ID NO: 61220 - RNA, 23 nt, Synthetic Construct
  source 1..23: mol_type = other RNA
tcttggagtaggtcattgggtgt

SEQ ID NO: 61221 - RNA, 23 nt, Synthetic Construct
  source 1..23: mol_type = other RNA
tcttggagtaggtcattgggtgt

SEQ ID NO: 61222 - RNA, 23 nt, Synthetic Construct
  source 1..23: mol_type = other RNA
caacggaaccccaaaagcagctg

SEQ ID NO: 61223 - RNA, 23 nt, Synthetic Construct
  source 1..23: mol_type = other RNA
caacggaaccccaaaagcagctg

SEQ ID NO: 61224 - RNA, 21 nt, Synthetic Construct
  source 1..21: mol_type = other RNA
cgtacagtgagtaataatgcg

SEQ ID NO: 61225 - RNA, 22 nt, Synthetic Construct
  source 1..22: mol_type = other RNA
tcgtaccgtgagtaatagtgcg

SEQ ID NO: 61226 - RNA, 23 nt, Synthetic Construct
  source 1..23: mol_type = other RNA
tcactgatcgagtcgtcctgcgc

SEQ ID NO: 61227 - RNA, 22 nt, Synthetic Construct
  source 1..22: mol_type = other RNA
tcacagtgaaccggtctcttta

SEQ ID NO: 61228 - RNA, 22 nt, Synthetic Construct
  source 1..22: mol_type = other RNA
tcgtgccgtgagtaataatgcg

SEQ ID NO: 61229 - RNA, 22 nt, Synthetic Construct
  source 1..22: mol_type = other RNA
ggcagcattgtacagggctatg

SEQ ID NO: 61230 - RNA, 16 nt, Synthetic Construct
  source 1..16: mol_type = other RNA
ctctacggccatacca

SEQ ID NO: 61231 - RNA, 22 nt, Synthetic Construct
  source 1..22: mol_type = other RNA
tcgaatccgagtcacggcacca

SEQ ID NO: 61232 - RNA, 22 nt, Synthetic Construct
  source 1..22: mol_type = other RNA
tcgaatccgagtcacggcacca

SEQ ID NO: 61233 - RNA, 22 nt, Synthetic Construct
  source 1..22: mol_type = other RNA
tagcagcacgtaaatataggcg

SEQ ID NO: 61234 - RNA, 22 nt, Synthetic Construct
  source 1..22: mol_type = other RNA
tgaggtagtaggttgtatagta

SEQ ID NO: 61235 - RNA, 22 nt, Synthetic Construct
  source 1..22: mol_type = other RNA
tgaggtagtaggttgtatagta

SEQ ID NO: 61236 - RNA, 29 nt, Synthetic Construct
  source 1..29: mol_type = other RNA
cccccccactgctaaatttgactggctta

SEQ ID NO: 61237 - RNA, 29 nt, Synthetic Construct
  source 1..29: mol_type = other RNA
cccccccactgctaaatttgactggctta

SEQ ID NO: 61238 - RNA, 27 nt, Synthetic Construct
  source 1..27: mol_type = other RNA
ccccccactactaaatttgactggctt

SEQ ID NO: 61239 - RNA, 22 nt, Synthetic Construct
  source 1..22: mol_type = other RNA
tcctgtacagagctgccccgag

SEQ ID NO: 61240 - RNA, 16 nt, Synthetic Construct
  source 1..16: mol_type = other RNA
cccaaaggtcgtcggt

SEQ ID NO: 61241 - RNA, 21 nt, Synthetic Construct
  source 1..21: mol_type = other RNA
cactgatcgagtcgtcctgcg

SEQ ID NO: 61242 - RNA, 21 nt, Synthetic Construct
  source 1..21: mol_type = other RNA
cactgatcgagtcgtcctgcg

SEQ ID NO: 61243 - RNA, 16 nt, Synthetic Construct
  source 1..16: mol_type = other RNA
gtctacggccacacca

SEQ ID NO: 61244 - RNA, 16 nt, Synthetic Construct
  source 1..16: mol_type = other RNA
gtctacggccacacca

SEQ ID NO: 61245 - RNA, 23 nt, Synthetic Construct
  source 1..23: mol_type = other RNA
caaagtgctgttcgtgcagatag

SEQ ID NO: 61246 - RNA, 23 nt, Synthetic Construct
  source 1..23: mol_type = other RNA
caaagtgctgttcgtgcagatag

SEQ ID NO: 61247 - RNA, 22 nt, Synthetic Construct
  source 1..22: mol_type = other RNA
tgaggtagtagttcgtgctgtt

SEQ ID NO: 61248 - RNA, 21 nt, Synthetic Construct
  source 1..21: mol_type = other RNA
tgaggaagtaggttgtatagt

SEQ ID NO: 61249 - RNA, 21 nt, Synthetic Construct
  source 1..21: mol_type = other RNA
tgaggaagtaggttgtatagt

SEQ ID NO: 61250 - RNA, 22 nt, Synthetic Construct
  source 1..22: mol_type = other RNA
cagtgcaatgttaaaagggcat

SEQ ID NO: 61251 - RNA, 22 nt, Synthetic Construct
  source 1..22: mol_type = other RNA
cagtgcaatgttaaaagggcat

SEQ ID NO: 61252 - RNA, 25 nt, Synthetic Construct
  source 1..25: mol_type = other RNA
ttgaggatatgagatcgagacgacg

SEQ ID NO: 61253 - RNA, 23 nt, Synthetic Construct
  source 1..23: mol_type = other RNA
caaagtgctgtacgtgcaggtag

SEQ ID NO: 61254 - RNA, 20 nt, Synthetic Construct
  source 1..20: mol_type = other RNA
tgaggtagcaggttgtatag

SEQ ID NO: 61255 - RNA, 22 nt, Synthetic Construct
  source 1..22: mol_type = other RNA
tcctgtactgagctgcctcgag

SEQ ID NO: 61256 - RNA, 18 nt, Synthetic Construct
  source 1..18: mol_type = other RNA
aaagcgaatgattagagg

SEQ ID NO: 61257 - RNA, 24 nt, Synthetic Construct
  source 1..24: mol_type = other RNA
tcccacatggtctagcggttagga

SEQ ID NO: 61258 - RNA, 22 nt, Synthetic Construct
  source 1..22: mol_type = other RNA
tcgtaccgtgagtagtaatgcg

SEQ ID NO: 61259 - RNA, 35 nt, Synthetic Construct; identical to SEQ ID NO: 1160
  source 1..35: mol_type = other RNA

SEQ ID NO: 61260 - RNA, 35 nt, Synthetic Construct; identical to SEQ ID NO: 1160
  source 1..35: mol_type = other RNA

SEQ ID NO: 61261 - RNA, 22 nt, Synthetic Construct
  source 1..22: mol_type = other RNA
tggagtgtggcaatggtgtttg

SEQ ID NO: 61262 - RNA, 23 nt, Synthetic Construct
  source 1..23: mol_type = other RNA
tcccgtactgagctgccccgagt

SEQ ID NO: 61263 - RNA, 23 nt, Synthetic Construct
  source 1..23: mol_type = other RNA
tcccgtactgagctgccccgagt

SEQ ID NO: 61264 - RNA, 23 nt, Synthetic Construct
  source 1..23: mol_type = other RNA
tctttggttatctagctgtatgt

SEQ ID NO: 61265 - RNA, 22 nt, Synthetic Construct
  source 1..22: mol_type = other RNA
tgaggtagtaggatgtgtggtt

SEQ ID NO: 61266 - RNA, 22 nt, Synthetic Construct
  source 1..22: mol_type = other RNA
tgaggtagtaggatgtgtggtt

SEQ ID NO: 61267 - RNA, 23 nt, Synthetic Construct
  source 1..23: mol_type = other RNA
tggtaatacgacgtacatagtgt

SEQ ID NO: 61268 - RNA, 22 nt, Synthetic Construct
  source 1..22: mol_type = other RNA
acagtagcctgcacattggtta

SEQ ID NO: 61269 - RNA, 22 nt, Synthetic Construct
  source 1..22: mol_type = other RNA
acagtagcctgcacattggtta

SEQ ID NO: 61270 - RNA, 21 nt, Synthetic Construct
  source 1..21: mol_type = other RNA
taggtagtttcctgttgttgg

SEQ ID NO: 61271 - RNA, 21 nt, Synthetic Construct
  source 1..21: mol_type = other RNA
taggtagtttcctgttgttgg

SEQ ID NO: 61272 - RNA, 22 nt, Synthetic Construct
  source 1..22: mol_type = other RNA
tgcggggctagggctaacagct

SEQ ID NO: 61273 - RNA, 22 nt, Synthetic Construct
  source 1..22: mol_type = other RNA
tgcggggctagggctaacagct

SEQ ID NO: 61274 - RNA, 29 nt, Synthetic Construct
  source 1..29: mol_type = other RNA
tccctggtggtctagtggttaggattcgg

SEQ ID NO: 61275 - RNA, 35 nt, Synthetic Construct; identical to SEQ ID NO: 2452
  source 1..35: mol_type = other RNA

SEQ ID NO: 61276 - RNA, 23 nt, Synthetic Construct
  source 1..23: mol_type = other RNA
agaggggcagagagcgagacttt

SEQ ID NO: 61277 - RNA, 23 nt, Synthetic Construct
  source 1..23: mol_type = other RNA
agaggggcagagagcgagacttt

SEQ ID NO: 61278 - RNA, 22 nt, Synthetic Construct
  source 1..22: mol_type = other RNA
tgaggtagtagtttgtgctgtg

SEQ ID NO: 61279 - RNA, 22 nt, Synthetic Construct
  source 1..22: mol_type = other RNA
tgaggtagtagtttgtgctgtg

SEQ ID NO: 61280 - RNA, 33 nt, Synthetic Construct; identical to SEQ ID NO: 9568
  source 1..33: mol_type = other RNA

SEQ ID NO: 61281 - RNA, 33 nt, Synthetic Construct; identical to SEQ ID NO: 9568
  source 1..33: mol_type = other RNA

SEQ ID NO: 61282 - RNA, 23 nt, Synthetic Construct
  source 1..23: mol_type = other RNA
tgaggtagtaggttgtatagtta

SEQ ID NO: 61283 - RNA, 23 nt, Synthetic Construct
  source 1..23: mol_type = other RNA
tgaggtagtaggttgtatagtta

SEQ ID NO: 61284 - RNA, 17 nt, Synthetic Construct
  source 1..17: mol_type = other RNA
agggaacgtgagctggg

SEQ ID NO: 61285 - RNA, 17 nt, Synthetic Construct
  source 1..17: mol_type = other RNA
agggaacgtgagctggg

SEQ ID NO: 61286 - RNA, 20 nt, Synthetic Construct
  source 1..20: mol_type = other RNA
gtgccgaagctgtgggattg

SEQ ID NO: 61287 - RNA, 22 nt, Synthetic Construct
  source 1..22: mol_type = other RNA
tgatgtagtagtttgtgctgtt

SEQ ID NO: 61288 - RNA, 22 nt, Synthetic Construct
  source 1..22: mol_type = other RNA
tgatgtagtagtttgtgctgtt

SEQ ID NO: 61289 - RNA, 23 nt, Synthetic Construct
  source 1..23: mol_type = other RNA
tgtgcaaatccatgcaaaactga

SEQ ID NO: 61290 - RNA, 23 nt, Synthetic Construct
  source 1..23: mol_type = other RNA
caacggaatcccaaaagcagcag

SEQ ID NO: 61291 - RNA, 23 nt, Synthetic Construct
  source 1..23: mol_type = other RNA
caacggaatcccaaaagcagcag

SEQ ID NO: 61292 - RNA, 23 nt, Synthetic Construct
  source 1..23: mol_type = other RNA
aatgacacgatcactcccgttgt

SEQ ID NO: 61293 - RNA, 22 nt, Synthetic Construct
  source 1..22: mol_type = other RNA
tgaggtagtagattgtgctgtt

SEQ ID NO: 61294 - RNA, 22 nt, Synthetic Construct
  source 1..22: mol_type = other RNA
tgaggtagtagattgtgctgtt

SEQ ID NO: 61295 - RNA, 22 nt, Synthetic Construct
  source 1..22: mol_type = other RNA
tgagaactggattccatgggtt

SEQ ID NO: 61296 - RNA, 22 nt, Synthetic Construct
  source 1..22: mol_type = other RNA
tgagaactggattccatgggtt

SEQ ID NO: 61297 - RNA, 22 nt, Synthetic Construct
  source 1..22: mol_type = other RNA
tagcagcacgtacatattggcg

SEQ ID NO: 61298 - RNA, 22 nt, Synthetic Construct
  source 1..22: mol_type = other RNA
tagcagcacgtacatattggcg

SEQ ID NO: 61299 - RNA, 16 nt, Synthetic Construct
  source 1..16: mol_type = other RNA
tacctggttgatcctg

SEQ ID NO: 61300 - RNA, 16 nt, Synthetic Construct
  source 1..16: mol_type = other RNA
tacctggttgatcctg

SEQ ID NO: 61301 - RNA, 23 nt, Synthetic Construct
  source 1..23: mol_type = other RNA
tcctgtgctgagctgccccgaga

SEQ ID NO: 61302 - RNA, 23 nt, Synthetic Construct
  source 1..23: mol_type = other RNA
tcctgtactgagctgccacgaga

SEQ ID NO: 61303 - RNA, 23 nt, Synthetic Construct
  source 1..23: mol_type = other RNA
tcctgtactgagctgccacgaga

SEQ ID NO: 61304 - RNA, 43 nt, Synthetic Construct; identical to SEQ ID NO: 2315
  source 1..43: mol_type = other RNA

SEQ ID NO: 61305 - RNA, 43 nt, Synthetic Construct; identical to SEQ ID NO: 2315
  source 1..43: mol_type = other RNA

SEQ ID NO: 61306 - RNA, 39 nt, Synthetic Construct; identical to SEQ ID NO: 773
  source 1..39: mol_type = other RNA

SEQ ID NO: 61307 - RNA, 28 nt, Synthetic Construct
  source 1..28: mol_type = other RNA
agcgctgagaagacggtcgaacttgact

SEQ ID NO: 61308 - RNA, 21 nt, Synthetic Construct
  source 1..21: mol_type = other RNA
tgacctatgaattgacagcca

SEQ ID NO: 61309 - RNA, 21 nt, Synthetic Construct
  source 1..21: mol_type = other RNA
tgacctatgaattgacagcca

SEQ ID NO: 61310 - RNA, 15 nt, Synthetic Construct
  source 1..15: mol_type = other RNA
gagctgtggataggg

SEQ ID NO: 61311 - RNA, 24 nt, Synthetic Construct
  source 1..24: mol_type = other RNA
tgtaaacatccccggctggaagct

SEQ ID NO: 61312 - RNA, 24 nt, Synthetic Construct
  source 1..24: mol_type = other RNA
tgtaaacatccccggctggaagct

SEQ ID NO: 61313 - RNA, 30 nt, Synthetic Construct; identical to SEQ ID NO: 3933
  source 1..30: mol_type = other RNA

SEQ ID NO: 61314 - RNA, 20 nt, Synthetic Construct
  source 1..20: mol_type = other RNA
tgaggtagaaggttgtgtgg

SEQ ID NO: 61315 - RNA, 21 nt, Synthetic Construct
  source 1..21: mol_type = other RNA
tcctgtaccgagctgccccga

SEQ ID NO: 61316 - RNA, 22 nt, Synthetic Construct
  source 1..22: mol_type = other RNA
tcagtagctcgaggaaaagaca

SEQ ID NO: 61317 - RNA, 22 nt, Synthetic Construct
  source 1..22: mol_type = other RNA
cagtggttttaccctatggtag

SEQ ID NO: 61318 - RNA, 22 nt, Synthetic Construct
  source 1..22: mol_type = other RNA
cagtggttttaccctatggtag

SEQ ID NO: 61319 - RNA, 23 nt, Synthetic Construct
  source 1..23: mol_type = other RNA
tggtaatatgacgtacttagtgt

SEQ ID NO: 61320 - RNA, 23 nt, Synthetic Construct
  source 1..23: mol_type = other RNA
tggtaatatgacgtacttagtgt

SEQ ID NO: 61321 - RNA, 23 nt, Synthetic Construct
  source 1..23: mol_type = other RNA
tgagaactgaattccatgggtta

SEQ ID NO: 61322 - RNA, 19 nt, Synthetic Construct
  source 1..19: mol_type = other RNA
cagcactctgcaaagacga

SEQ ID NO: 61323 - RNA, 21 nt, Synthetic Construct
  source 1..21: mol_type = other RNA
ctagactggagctccttgagg

SEQ ID NO: 61324 - RNA, 21 nt, Synthetic Construct
  source 1..21: mol_type = other RNA
tcctgtctgaatatgggggga

SEQ ID NO: 61325 - RNA, 21 nt, Synthetic Construct
  source 1..21: mol_type = other RNA
tcctgtctgaatatgggggga

SEQ ID NO: 61326 - RNA, 23 nt, Synthetic Construct
  source 1..23: mol_type = other RNA
caacggaatcacaaaagcagctg

SEQ ID NO: 61327 - RNA, 23 nt, Synthetic Construct
  source 1..23: mol_type = other RNA
caacggaatcacaaaagcagctg

SEQ ID NO: 61328 - RNA, 22 nt, Synthetic Construct
  source 1..22: mol_type = other RNA
tgaggtagtagtttgtactgtt

SEQ ID NO: 61329 - RNA, 23 nt, Synthetic Construct
  source 1..23: mol_type = other RNA
tcccccaggtgtgattctgattt

SEQ ID NO: 61330 - RNA, 23 nt, Synthetic Construct
  source 1..23: mol_type = other RNA
tcccccaggtgtgattctgattt

SEQ ID NO: 61331 - RNA, 21 nt, Synthetic Construct
  source 1..21: mol_type = other RNA
tgaggtagtaggttgtataga

SEQ ID NO: 61332 - RNA, 21 nt, Synthetic Construct
  source 1..21: mol_type = other RNA
tgaggtagtaggttgtataga

SEQ ID NO: 61333 - RNA, 23 nt, Synthetic Construct
  source 1..23: mol_type = other RNA
tgaggggtagagagcgagacttt

SEQ ID NO: 61334 - RNA, 20 nt, Synthetic Construct
  source 1..20: mol_type = other RNA
ctgacctatgaattgacagc

SEQ ID NO: 61335 - RNA, 20 nt, Synthetic Construct
  source 1..20: mol_type = other RNA
ctgacctatgaattgacagc

SEQ ID NO: 61336 - RNA, 22 nt, Synthetic Construct
  source 1..22: mol_type = other RNA
tattgcacttgtcctggcctgt

SEQ ID NO: 61337 - RNA, 22 nt, Synthetic Construct
  source 1..22: mol_type = other RNA
tgaggtagtagtttgtgctgct

SEQ ID NO: 61338 - RNA, 22 nt, Synthetic Construct
  source 1..22: mol_type = other RNA
tgaggtagtagtttgtgctgct

SEQ ID NO: 61339 - RNA, 23 nt, Synthetic Construct
  source 1..23: mol_type = other RNA
tccagtactgagctgccccgaga

SEQ ID NO: 61340 - RNA, 23 nt, Synthetic Construct
  source 1..23: mol_type = other RNA
tccagtactgagctgccccgaga

SEQ ID NO: 61341 - RNA, 22 nt, Synthetic Construct
  source 1..22: mol_type = other RNA
cagtgcaatgttaaaagggcat

SEQ ID NO: 61342 - RNA, 22 nt, Synthetic Construct
  source 1..22: mol_type = other RNA
cagtgcaatgttaaaagggcat

SEQ ID NO: 61343 - RNA, 17 nt, Synthetic Construct
  source 1..17: mol_type = other RNA
ccgtgtgaaagtaggtc

SEQ ID NO: 61344 - RNA, 17 nt, Synthetic Construct
  source 1..17: mol_type = other RNA
ccgtgtgaaagtaggtc

SEQ ID NO: 61345 - RNA, 23 nt, Synthetic Construct
  source 1..23: mol_type = other RNA
agcagcatcgtacagggctatga

SEQ ID NO: 61346 - RNA, 23 nt, Synthetic Construct
  source 1..23: mol_type = other RNA
agcagcatcgtacagggctatga

SEQ ID NO: 61347 - RNA, 22 nt, Synthetic Construct
  source 1..22: mol_type = other RNA
tggggtagtaggttgtatagtt

SEQ ID NO: 61348 - RNA, 23 nt, Synthetic Construct
  source 1..23: mol_type = other RNA
caaagagctgttcgtgcaggtag

SEQ ID NO: 61349 - RNA, 21 nt, Synthetic Construct
  source 1..21: mol_type = other RNA
cgcatcccctagggcattggt

SEQ ID NO: 61350 - RNA, 21 nt, Synthetic Construct
  source 1..21: mol_type = other RNA
cgcatcccctagggcattggt

SEQ ID NO: 61351 - RNA, 21 nt, Synthetic Construct
  source 1..21: mol_type = other RNA
ctagactgaagccccttgagg

SEQ ID NO: 61352 - RNA, 22 nt, Synthetic Construct
  source 1..22: mol_type = other RNA
tgaggtagtagattgtgctgtt

SEQ ID NO: 61353 - RNA, 22 nt, Synthetic Construct
  source 1..22: mol_type = other RNA
tgaggtagtagattgtgctgtt

SEQ ID NO: 61354 - RNA, 19 nt, Synthetic Construct
  source 1..19: mol_type = other RNA
tttgttcgttcggctcgcg

SEQ ID NO: 61355 - RNA, 19 nt, Synthetic Construct
  source 1..19: mol_type = other RNA
tttgttcgttcggctcgcg

SEQ ID NO: 61356 - RNA, 23 nt, Synthetic Construct
  source 1..23: mol_type = other RNA
tgtcagtttgtcaagtaccccaa

SEQ ID NO: 61357 - RNA, 23 nt, Synthetic Construct
  source 1..23: mol_type = other RNA
tgtcagtttgtcaagtaccccaa

SEQ ID NO: 61358 - RNA, 25 nt, Synthetic Construct
  source 1..25: mol_type = other RNA
tgcgagagtaggacgttgccaggtt

SEQ ID NO: 61359 - RNA, 25 nt, Synthetic Construct
  source 1..25: mol_type = other RNA
tgcgagagtaggacgttgccaggtt

SEQ ID NO: 61360 - RNA, 21 nt, Synthetic Construct
  source 1..21: mol_type = other RNA
aatggcgccactagggttgtg

SEQ ID NO: 61361 - RNA, 21 nt, Synthetic Construct
  source 1..21: mol_type = other RNA
aatggcgccactagggttgtg

SEQ ID NO: 61362 - RNA, 21 nt, Synthetic Construct
  source 1..21: mol_type = other RNA
ctagactggagctccttgagg

SEQ ID NO: 61363 - RNA, 21 nt, Synthetic Construct
  source 1..21: mol_type = other RNA
ctagactggagctccttgagg

SEQ ID NO: 61364 - RNA, 22 nt, Synthetic Construct
  source 1..22: mol_type = other RNA
tcgtaccgtgagtaataatgcg

SEQ ID NO: 61365 - RNA, 23 nt, Synthetic Construct
  source 1..23: mol_type = other RNA
caaaagtaattgcggtctttggt

SEQ ID NO: 61366 - RNA, 23 nt, Synthetic Construct
  source 1..23: mol_type = other RNA
caaaagtaattgcggtctttggt

SEQ ID NO: 61367 - RNA, 16 nt, Synthetic Construct
  source 1..16: mol_type = other RNA
tgcgtagatatgcgga

SEQ ID NO: 61368 - RNA, 21 nt, Synthetic Construct
  source 1..21: mol_type = other RNA
tgaggaagtaggttgtgtggt

SEQ ID NO: 61369 - RNA, 21 nt, Synthetic Construct
  source 1..21: mol_type = other RNA
tgaggaagtaggttgtgtggt

SEQ ID NO: 61370 - RNA, 22 nt, Synthetic Construct
  source 1..22: mol_type = other RNA
aatcgtacagggtcatccactt

SEQ ID NO: 61371 - RNA, 22 nt, Synthetic Construct
  source 1..22: mol_type = other RNA
aatcgtacagggtcatccactt

SEQ ID NO: 61372 - RNA, 20 nt, Synthetic Construct
  source 1..20: mol_type = other RNA
acagtagtctgcacattggt

SEQ ID NO: 61373 - RNA, 24 nt, Synthetic Construct
  source 1..24: mol_type = other RNA
caaagtgctgttcgtgcaggtaga

SEQ ID NO: 61374 - RNA, 24 nt, Synthetic Construct
  source 1..24: mol_type = other RNA
caaagtgctgttcgtgcaggtaga

SEQ ID NO: 61375 - RNA, 22 nt, Synthetic Construct
  source 1..22: mol_type = other RNA
tatatatatatatgtacgtatg

SEQ ID NO: 61376 - RNA, 22 nt, Synthetic Construct
  source 1..22: mol_type = other RNA
tatatatatatatgtacgtatg

SEQ ID NO: 61377 - RNA, 30 nt, Synthetic Construct; identical to SEQ ID NO: 2353
  source 1..30: mol_type = other RNA

SEQ ID NO: 61378 - RNA, 15 nt, Synthetic Construct
  source 1..15: mol_type = other RNA
catgccgcgtgcggg

SEQ ID NO: 61379 - RNA, 18 nt, Synthetic Construct
  source 1..18: mol_type = other RNA
tcttcggtagtatagtgg

SEQ ID NO: 61380 - RNA, 18 nt, Synthetic Construct
  source 1..18: mol_type = other RNA
tcttcggtagtatagtgg

SEQ ID NO: 61381 - RNA, 22 nt, Synthetic Construct
  source 1..22: mol_type = other RNA
tcaggctcagtcccctcccgtt

SEQ ID NO: 61382 - RNA, 30 nt, Synthetic Construct; identical to SEQ ID NO: 3933
  source 1..30: mol_type = other RNA

SEQ ID NO: 61383 - RNA, 21 nt, Synthetic Construct
  source 1..21: mol_type = other RNA
tgaggtagtaggtcgtgtggt

SEQ ID NO: 61384 - RNA, 24 nt, Synthetic Construct
  source 1..24: mol_type = other RNA
tgtcagtttgtcaaataccccaag

SEQ ID NO: 61385 - RNA, 24 nt, Synthetic Construct
  source 1..24: mol_type = other RNA
tgtcagtttgtcaaataccccaag

SEQ ID NO: 61386 - RNA, 21 nt, Synthetic Construct
  source 1..21: mol_type = other RNA
aatggcgccactagggttgtg

SEQ ID NO: 61387 - RNA, 23 nt, Synthetic Construct
  source 1..23: mol_type = other RNA
caaagaattctccttttgggctt

SEQ ID NO: 61388 - RNA, 21 nt, Synthetic Construct
  source 1..21: mol_type = other RNA
tggagtgtggcaatggtgttt

SEQ ID NO: 61389 - RNA, 21 nt, Synthetic Construct
  source 1..21: mol_type = other RNA
tggagtgtggcaatggtgttt

SEQ ID NO: 61390 - RNA, 17 nt, Synthetic Construct
  source 1..17: mol_type = other RNA
atcgtgacgatagtgca

SEQ ID NO: 61391 - RNA, 17 nt, Synthetic Construct
  source 1..17: mol_type = other RNA
atcgtgacgatagtgca

SEQ ID NO: 61392 - RNA, 27 nt, Synthetic Construct
  source 1..27: mol_type = other RNA
ccccccactgctaaatttgattggctt

SEQ ID NO: 61393 - RNA, 23 nt, Synthetic Construct
  source 1..23: mol_type = other RNA
tggtaatacgacgtacatagtgt

SEQ ID NO: 61394 - RNA, 23 nt, Synthetic Construct
  source 1..23: mol_type = other RNA
tggtaatacgacgtacatagtgt

SEQ ID NO: 61395 - RNA, 23 nt, Synthetic Construct
  source 1..23: mol_type = other RNA
caaagtgctgtttgtgcaggtag

SEQ ID NO: 61396 - RNA, 23 nt, Synthetic Construct
  source 1..23: mol_type = other RNA
caaagtgctgtttgtgcaggtag

SEQ ID NO: 61397 - RNA, 22 nt, Synthetic Construct
  source 1..22: mol_type = other RNA
aaactccttaagcgaatctcgc

SEQ ID NO: 61398 - RNA, 22 nt, Synthetic Construct
  source 1..22: mol_type = other RNA
aaactccttaagcgaatctcgc

SEQ ID NO: 61399 - RNA, 21 nt, Synthetic Construct
  source 1..21: mol_type = other RNA
agcagcacgtaaatattggcg

SEQ ID NO: 61400 - RNA, 21 nt, Synthetic Construct
  source 1..21: mol_type = other RNA
agcagcacgtaaatattggcg

SEQ ID NO: 61401 - RNA, 22 nt, Synthetic Construct
  source 1..22: mol_type = other RNA
tgatgtagtaggttgtatagtt

SEQ ID NO: 61402 - RNA, 22 nt, Synthetic Construct
  source 1..22: mol_type = other RNA
tgatgtagtaggttgtatagtt

SEQ ID NO: 61403 - RNA, 27 nt, Synthetic Construct
  source 1..27: mol_type = other RNA
cgactcttagcggtggatcactcggct

SEQ ID NO: 61404 - RNA, 23 nt, Synthetic Construct
  source 1..23: mol_type = other RNA
ttcaagtaattcaggataggtta

SEQ ID NO: 61405 - RNA, 22 nt, Synthetic Construct
  source 1..22: mol_type = other RNA
tgaggtagtaggctgtatagtt

SEQ ID NO: 61406 - RNA, 22 nt, Synthetic Construct
  source 1..22: mol_type = other RNA
tgacctatgaattgacagccag

SEQ ID NO: 61407 - RNA, 22 nt, Synthetic Construct
  source 1..22: mol_type = other RNA
tgacctatgaattgacagccag

SEQ ID NO: 61408 - RNA, 21 nt, Synthetic Construct
  source 1..21: mol_type = other RNA
tggagtgtggcaatggtgttt

SEQ ID NO: 61409 - RNA, 21 nt, Synthetic Construct
  source 1..21: mol_type = other RNA
tggagtgtggcaatggtgttt

SEQ ID NO: 61410 - RNA, 23 nt, Synthetic Construct
  source 1..23: mol_type = other RNA
caaagtgctgttcgtgcagatag

SEQ ID NO: 61411 - RNA, 21 nt, Synthetic Construct
  source 1..21: mol_type = other RNA
tccagtactgagctgccccga

SEQ ID NO: 61412 - RNA, 21 nt, Synthetic Construct
  source 1..21: mol_type = other RNA
tccagtactgagctgccccga

SEQ ID NO: 61413 - RNA, 25 nt, Synthetic Construct
  source 1..25: mol_type = other RNA
gttgaattgtggtctgtggacgtgg

SEQ ID NO: 61414 - RNA, 25 nt, Synthetic Construct
  source 1..25: mol_type = other RNA
gttgaattgtggtctgtggacgtgg

SEQ ID NO: 61415 - RNA, 33 nt, Synthetic Construct; identical to SEQ ID NO: 1982
  source 1..33: mol_type = other RNA

SEQ ID NO: 61416 - RNA, 22 nt, Synthetic Construct
  source 1..22: mol_type = other RNA
tgaggtagtagtttgtgctgat

SEQ ID NO: 61417 - RNA, 22 nt, Synthetic Construct
  source 1..22: mol_type = other RNA
tgaggtagtagtttgtgctgat

SEQ ID NO: 61418 - RNA, 23 nt, Synthetic Construct
  source 1..23: mol_type = other RNA
tcggatccgtctgagcttggctt

SEQ ID NO: 61419 - RNA, 22 nt, Synthetic Construct
  source 1..22: mol_type = other RNA
tagcagcgcgtaaatattggcg

SEQ ID NO: 61420 - RNA, 32 nt, Synthetic Construct; identical to SEQ ID NO: 1237
  source 1..32: mol_type = other RNA

SEQ ID NO: 61421 - RNA, 35 nt, Synthetic Construct; identical to SEQ ID NO: 1490
  source 1..35: mol_type = other RNA

SEQ ID NO: 61422 - RNA, 35 nt, Synthetic Construct; identical to SEQ ID NO: 1490
  source 1..35: mol_type = other RNA

SEQ ID NO: 61423 - RNA, 22 nt, Synthetic Construct
  source 1..22: mol_type = other RNA
tcctgtactgagttgccccgag

SEQ ID NO: 61424 - RNA, 22 nt, Synthetic Construct
  source 1..22: mol_type = other RNA
tcctgtactgagttgccccgag

SEQ ID NO: 61425 - RNA, 27 nt, Synthetic Construct
  source 1..27: mol_type = other RNA
cagagttctacagtccgacgatcgatc

SEQ ID NO: 61426 - RNA, 27 nt, Synthetic Construct
  source 1..27: mol_type = other RNA
cagagttctacagtccgacgatcgatc

SEQ ID NO: 61427 - RNA, 22 nt, Synthetic Construct
  source 1..22: mol_type = other RNA
tgaggtagtagtttgtgccgtt

SEQ ID NO: 61428 - RNA, 24 nt, Synthetic Construct
  source 1..24: mol_type = other RNA
caacggaatcccaaaagcagctat

SEQ ID NO: 61429 - RNA, 32 nt, Synthetic Construct; identical to SEQ ID NO: 2296
  source 1..32: mol_type = other RNA

SEQ ID NO: 61430 - RNA, 20 nt, Synthetic Construct
  source 1..20: mol_type = other RNA
tgaggtagtaggttgtgtga

SEQ ID NO: 61431 - RNA, 20 nt, Synthetic Construct
  source 1..20: mol_type = other RNA
tgaggtagtaggttgtgtga

SEQ ID NO: 61432 - RNA, 21 nt, Synthetic Construct
  source 1..21: mol_type = other RNA
tgaggtagtagtctgtgctgt

SEQ ID NO: 61433 - RNA, 17 nt, Synthetic Construct
  source 1..17: mol_type = other RNA
ggctggtccgaaggtag

SEQ ID NO: 61434 - RNA, 23 nt, Synthetic Construct
  source 1..23: mol_type = other RNA
tcagtgcatgacagaacttggga

SEQ ID NO: 61435 - RNA, 25 nt, Synthetic Construct
  source 1..25: mol_type = other RNA
cgtgtatttgacaagctgagttggt

SEQ ID NO: 61436 - RNA, 25 nt, Synthetic Construct
  source 1..25: mol_type = other RNA
cgtgtatttgacaagctgagttggt

SEQ ID NO: 61437 - RNA, 22 nt, Synthetic Construct
  source 1..22: mol_type = other RNA
ttgcagcacgtaaatattggcg

SEQ ID NO: 61438 - RNA, 22 nt, Synthetic Construct
  source 1..22: mol_type = other RNA
ttgcagcacgtaaatattggcg

SEQ ID NO: 61439 - RNA, 24 nt, Synthetic Construct
  source 1..24: mol_type = other RNA
aaaagctgggttgagagggcgaaa

SEQ ID NO: 61440 - RNA, 22 nt, Synthetic Construct
  source 1..22: mol_type = other RNA
tcgtaccgtgggtaataatgcg

SEQ ID NO: 61441 - RNA, 22 nt, Synthetic Construct
  source 1..22: mol_type = other RNA
tctttggttatctagctgtatg

SEQ ID NO: 61442 - RNA, 23 nt, Synthetic Construct
  source 1..23: mol_type = other RNA
tgggctaagggagatgattgggt

SEQ ID NO: 61443 - RNA, 21 nt, Synthetic Construct
  source 1..21: mol_type = other RNA
aggttccggataagtagagcc

SEQ ID NO: 61444 - RNA, 21 nt, Synthetic Construct
  source 1..21: mol_type = other RNA
aggttccggataagtagagcc

SEQ ID NO: 61445 - RNA, 21 nt, Synthetic Construct
  source 1..21: mol_type = other RNA
tgaggtggtagattgtatagt

SEQ ID NO: 61446 - RNA, 21 nt, Synthetic Construct
  source 1..21: mol_type = other RNA
tgaggtggtagattgtatagt

SEQ ID NO: 61447 - RNA, 22 nt, Synthetic Construct
  source 1..22: mol_type = other RNA
tccccttggggttgtaggacca

SEQ ID NO: 61448 - RNA, 22 nt, Synthetic Construct
  source 1..22: mol_type = other RNA
tccccttggggttgtaggacca

SEQ ID NO: 61449 - RNA, 24 nt, Synthetic Construct
  source 1..24: mol_type = other RNA
agcaacattgtctgctgggtttct

SEQ ID NO: 61450 - RNA, 17 nt, Synthetic Construct
  source 1..17: mol_type = other RNA
agacagcaggacggtgg

SEQ ID NO: 61451 - RNA, 17 nt, Synthetic Construct
  source 1..17: mol_type = other RNA
agacagcaggacggtgg

SEQ ID NO: 61452 - RNA, 36 nt, Synthetic Construct; identical to SEQ ID NO: 3596
  source 1..36: mol_type = other RNA

SEQ ID NO: 61453 - RNA, 36 nt, Synthetic Construct; identical to SEQ ID NO: 3596
  source 1..36: mol_type = other RNA

SEQ ID NO: 61454 - RNA, 22 nt, Synthetic Construct
  source 1..22: mol_type = other RNA
ccgtaccgtgagtaataatgcg

SEQ ID NO: 61455 - RNA, 16 nt, Synthetic Construct
  source 1..16: mol_type = other RNA
accgcttttgtcaggg

SEQ ID NO: 61456 - RNA, 16 nt, Synthetic Construct
  source 1..16: mol_type = other RNA
accgcttttgtcaggg

SEQ ID NO: 61457 - RNA, 21 nt, Synthetic Construct
  source 1..21: mol_type = other RNA
tggggggcagagagcgagact

SEQ ID NO: 61458 - RNA, 21 nt, Synthetic Construct
  source 1..21: mol_type = other RNA
tggggggcagagagcgagact

SEQ ID NO: 61459 - RNA, 15 nt, Synthetic Construct
  source 1..15: mol_type = other RNA
ggtagcgtggccgag

SEQ ID NO: 61460 - RNA, 15 nt, Synthetic Construct
  source 1..15: mol_type = other RNA
ggtagcgtggccgag

SEQ ID NO: 61461 - RNA, 22 nt, Synthetic Construct
  source 1..22: mol_type = other RNA
tatagcacttgtcccggcctgt

SEQ ID NO: 61462 - RNA, 22 nt, Synthetic Construct
  source 1..22: mol_type = other RNA
tatagcacttgtcccggcctgt

SEQ ID NO: 61463 - RNA, 21 nt, Synthetic Construct
  source 1..21: mol_type = other RNA
agctacattgtctgctgggtt

SEQ ID NO: 61464 - RNA, 21 nt, Synthetic Construct
  source 1..21: mol_type = other RNA
tgaggtagtggattgtatagt

SEQ ID NO: 61465 - RNA, 23 nt, Synthetic Construct
  source 1..23: mol_type = other RNA
gtccagttttcccaggaatccct

SEQ ID NO: 61466 - RNA, 23 nt, Synthetic Construct
  source 1..23: mol_type = other RNA
gtccagttttcccaggaatccct

SEQ ID NO: 61467 - RNA, 22 nt, Synthetic Construct
  source 1..22: mol_type = other RNA
tgtggtagtagattgtatagtt

SEQ ID NO: 61468 - RNA, 22 nt, Synthetic Construct
  source 1..22: mol_type = other RNA
tgtggtagtagattgtatagtt

SEQ ID NO: 61469 - RNA, 22 nt, Synthetic Construct
  source 1..22: mol_type = other RNA
tattacacttgtcccggcctgt

SEQ ID NO: 61470 - RNA, 22 nt, Synthetic Construct
  source 1..22: mol_type = other RNA
tattacacttgtcccggcctgt

SEQ ID NO: 61471 - RNA, 24 nt, Synthetic Construct
  source 1..24: mol_type = other RNA
ggctacattgtctgctgggtttct

SEQ ID NO: 61472 - RNA, 23 nt, Synthetic Construct
  source 1..23: mol_type = other RNA
cccagtgttcagactacctgttc

SEQ ID NO: 61473 - RNA, 21 nt, Synthetic Construct
  source 1..21: mol_type = other RNA
tcctgtactgagctgcctcga

SEQ ID NO: 61474 - RNA, 29 nt, Synthetic Construct
  source 1..29: mol_type = other RNA
gcattgtggttcagtggtagaattctcgc

SEQ ID NO: 61475 - RNA, 29 nt, Synthetic Construct
  source 1..29: mol_type = other RNA
gcattgtggttcagtggtagaattctcgc

SEQ ID NO: 61476 - RNA, 22 nt, Synthetic Construct
  source 1..22: mol_type = other RNA
tcttgtactgagctgccccgag

SEQ ID NO: 61477 - RNA, 22 nt, Synthetic Construct
  source 1..22: mol_type = other RNA
tcttgtactgagctgccccgag

SEQ ID NO: 61478 - RNA, 23 nt, Synthetic Construct
  source 1..23: mol_type = other RNA
ttggtccccttcaaccagctgtt

SEQ ID NO: 61479 - RNA, 23 nt, Synthetic Construct
  source 1..23: mol_type = other RNA
ttggtccccttcaaccagctgtt

SEQ ID NO: 61480 - RNA, 28 nt, Synthetic Construct
  source 1..28: mol_type = other RNA
ccgtgtgaaagtaggtcatcgtcaggct

SEQ ID NO: 61481 - RNA, 25 nt, Synthetic Construct
  source 1..25: mol_type = other RNA
tgaggtagtaggttgtgtggttatt

SEQ ID NO: 61482 - RNA, 23 nt, Synthetic Construct
  source 1..23: mol_type = other RNA
tgaggggcagagagagagacttt

SEQ ID NO: 61483 - RNA, 23 nt, Synthetic Construct
  source 1..23: mol_type = other RNA
tgaggggcagagagagagacttt

SEQ ID NO: 61484 - RNA, 21 nt, Synthetic Construct
  source 1..21: mol_type = other RNA
tgaggtagtaggttatgtggt

SEQ ID NO: 61485 - RNA, 21 nt, Synthetic Construct
  source 1..21: mol_type = other RNA
tgaggtagtaggttatgtggt

SEQ ID NO: 61486 - RNA, 35 nt, Synthetic Construct; identical to SEQ ID NO: 2567
  source 1..35: mol_type = other RNA

SEQ ID NO: 61487 - RNA, 35 nt, Synthetic Construct; identical to SEQ ID NO: 2567
  source 1..35: mol_type = other RNA

SEQ ID NO: 61488 - RNA, 24 nt, Synthetic Construct
  source 1..24: mol_type = other RNA
tgaggtagtaggttgtgtggtttt

SEQ ID NO: 61489 - RNA, 24 nt, Synthetic Construct
  source 1..24: mol_type = other RNA
tgtaaacatccccggctggaagct

SEQ ID NO: 61490 - RNA, 24 nt, Synthetic Construct
  source 1..24: mol_type = other RNA
tgtaaacatccccggctggaagct

SEQ ID NO: 61491 - RNA, 30 nt, Synthetic Construct; identical to SEQ ID NO: 751
  source 1..30: mol_type = other RNA

SEQ ID NO: 61492 - RNA, 30 nt, Synthetic Construct; identical to SEQ ID NO: 751
  source 1..30: mol_type = other RNA

SEQ ID NO: 61493 - RNA, 21 nt, Synthetic Construct
  source 1..21: mol_type = other RNA
gcagtagtctgcacattggtt

SEQ ID NO: 61494 - RNA, 23 nt, Synthetic Construct
  source 1..23: mol_type = other RNA
agcagaattgtacagggctatga

SEQ ID NO: 61495 - RNA, 23 nt, Synthetic Construct
  source 1..23: mol_type = other RNA
agcagaattgtacagggctatga

SEQ ID NO: 61496 - RNA, 21 nt, Synthetic Construct
  source 1..21: mol_type = other RNA
tgaggtagtaggctgtatagt

SEQ ID NO: 61497 - RNA, 23 nt, Synthetic Construct
  source 1..23: mol_type = other RNA
caacggaatcccaaaagcggctg

SEQ ID NO: 61498 - RNA, 23 nt, Synthetic Construct
  source 1..23: mol_type = other RNA
caacggaatcccaaaagcggctg

SEQ ID NO: 61499 - RNA, 21 nt, Synthetic Construct
  source 1..21: mol_type = other RNA
atgtcccacccccactcctgt

SEQ ID NO: 61500 - RNA, 21 nt, Synthetic Construct
  source 1..21: mol_type = other RNA
atgtcccacccccactcctgt

SEQ ID NO: 61501 - RNA, 23 nt, Synthetic Construct
  source 1..23: mol_type = other RNA
tgaggtagtaggctgtgtggttt

SEQ ID NO: 61502 - RNA, 31 nt, Synthetic Construct; identical to SEQ ID NO: 2310
  source 1..31: mol_type = other RNA

SEQ ID NO: 61503 - RNA, 23 nt, Synthetic Construct
  source 1..23: mol_type = other RNA
agcagcattgtacggggctatga

SEQ ID NO: 61504 - RNA, 22 nt, Synthetic Construct
  source 1..22: mol_type = other RNA
tgaggtagtagattgtgtagtt

SEQ ID NO: 61505 - RNA, 22 nt, Synthetic Construct
  source 1..22: mol_type = other RNA
tgaggtagtagattgtgtagtt

SEQ ID NO: 61506 - RNA, 26 nt, Synthetic Construct
  source 1..26: mol_type = other RNA
gacttaccaaacctatgcaaactccg

SEQ ID NO: 61507 - RNA, 26 nt, Synthetic Construct
  source 1..26: mol_type = other RNA
gacttaccaaacctatgcaaactccg

SEQ ID NO: 61508 - RNA, 21 nt, Synthetic Construct
  source 1..21: mol_type = other RNA
tggagtgtgacaatggtgtct

SEQ ID NO: 61509 - RNA, 21 nt, Synthetic Construct
  source 1..21: mol_type = other RNA
tggagtgtgacaatggtgtct

SEQ ID NO: 61510 - RNA, 21 nt, Synthetic Construct
  source 1..21: mol_type = other RNA
gcagatcttggtggtagtagc

SEQ ID NO: 61511 - RNA, 21 nt, Synthetic Construct
  source 1..21: mol_type = other RNA
gcagatcttggtggtagtagc

SEQ ID NO: 61512 - RNA, 21 nt, Synthetic Construct
  source 1..21: mol_type = other RNA
tcctgtaccgagctgccccga

SEQ ID NO: 61513 - RNA, 22 nt, Synthetic Construct
  source 1..22: mol_type = other RNA
cgtaccgtgagtaataatgcgt

SEQ ID NO: 61514 - RNA, 23 nt, Synthetic Construct
  source 1..23: mol_type = other RNA
tgtcagtttgtcaaataccccaa

SEQ ID NO: 61515 - RNA, 22 nt, Synthetic Construct
  source 1..22: mol_type = other RNA
tattgtacttgtcccggcctgt

SEQ ID NO: 61516 - RNA, 22 nt, Synthetic Construct
  source 1..22: mol_type = other RNA
tattgtacttgtcccggcctgt

SEQ ID NO: 61517 - RNA, 23 nt, Synthetic Construct
  source 1..23: mol_type = other RNA
caaagaattctccttttgggctt

SEQ ID NO: 61518 - RNA, 23 nt, Synthetic Construct
  source 1..23: mol_type = other RNA
caaagaattctccttttgggctt

SEQ ID NO: 61519 - RNA, 16 nt, Synthetic Construct
  source 1..16: mol_type = other RNA
accgcttttgtcaggg

SEQ ID NO: 61520 - RNA, 16 nt, Synthetic Construct
  source 1..16: mol_type = other RNA
accgcttttgtcaggg

SEQ ID NO: 61521 - RNA, 22 nt, Synthetic Construct
  source 1..22: mol_type = other RNA
ctcgtaccgtgagtaataatgc

SEQ ID NO: 61522 - RNA, 15 nt, Synthetic Construct
  source 1..15: mol_type = other RNA
cggcccagactccta

SEQ ID NO: 61523 - RNA, 22 nt, Synthetic Construct
  source 1..22: mol_type = other RNA
tgaggtagtaggttgtgttgtt

SEQ ID NO: 61524 - RNA, 20 nt, Synthetic Construct
  source 1..20: mol_type = other RNA
ggggatgtagctcagatggt

SEQ ID NO: 61525 - RNA, 20 nt, Synthetic Construct
  source 1..20: mol_type = other RNA
ggggatgtagctcagatggt

SEQ ID NO: 61526 - RNA, 34 nt, Synthetic Construct; identical to SEQ ID NO: 6757
  source 1..34: mol_type = other RNA

SEQ ID NO: 61527 - RNA, 23 nt, Synthetic Construct
  source 1..23: mol_type = other RNA
caaagtgctgtttgtgcaggtag

SEQ ID NO: 61528 - RNA, 17 nt, Synthetic Construct
  source 1..17: mol_type = other RNA
cagtagctcgaggaaaa

SEQ ID NO: 61529 - RNA, 20 nt, Synthetic Construct
  source 1..20: mol_type = other RNA
tgaggtagtaggttgtgtga

SEQ ID NO: 61530 - RNA, 22 nt, Synthetic Construct
  source 1..22: mol_type = other RNA
tgtcccacccccactcctgttt

SEQ ID NO: 61531 - RNA, 22 nt, Synthetic Construct
  source 1..22: mol_type = other RNA
tgtcccacccccactcctgttt

SEQ ID NO: 61532 - RNA, 15 nt, Synthetic Construct
  source 1..15: mol_type = other RNA
gctatgggatttgtt

SEQ ID NO: 61533 - RNA, 22 nt, Synthetic Construct
  source 1..22: mol_type = other RNA
tgaggtagtagtttgtgctgtt

SEQ ID NO: 61534 - RNA, 22 nt, Synthetic Construct
  source 1..22: mol_type = other RNA
tgaggtagtagtttgtgctgtt

SEQ ID NO: 61535 - RNA, 19 nt, Synthetic Construct
  source 1..19: mol_type = other RNA
tccccggcatctccaccaa

SEQ ID NO: 61536 - RNA, 17 nt, Synthetic Construct
  source 1..17: mol_type = other RNA
acagtgtgaatcggcgc

SEQ ID NO: 61537 - RNA, 17 nt, Synthetic Construct
  source 1..17: mol_type = other RNA
acagtgtgaatcggcgc

SEQ ID NO: 61538 - RNA, 19 nt, Synthetic Construct
  source 1..19: mol_type = other RNA
gaaaagctgggttgagagg

SEQ ID NO: 61539 - RNA, 27 nt, Synthetic Construct
  source 1..27: mol_type = other RNA
agagcagctaataccgcatacgacctg

SEQ ID NO: 61540 - RNA, 27 nt, Synthetic Construct
  source 1..27: mol_type = other RNA
agagcagctaataccgcatacgacctg

SEQ ID NO: 61541 - RNA, 21 nt, Synthetic Construct
  source 1..21: mol_type = other RNA
cgaggtagtaggttgtatagt

SEQ ID NO: 61542 - RNA, 18 nt, Synthetic Construct
  source 1..18: mol_type = other RNA
gtccggatcgtagtctgc

SEQ ID NO: 61543 - RNA, 18 nt, Synthetic Construct
  source 1..18: mol_type = other RNA
gtccggatcgtagtctgc

SEQ ID NO: 61544 - RNA, 21 nt, Synthetic Construct
  source 1..21: mol_type = other RNA
tgaggtagtaggtcgtgtggt

SEQ ID NO: 61545 - RNA, 22 nt, Synthetic Construct
  source 1..22: mol_type = other RNA
tgacgtagtaggttgtatagtt

SEQ ID NO: 61546 - RNA, 38 nt, Synthetic Construct; identical to SEQ ID NO: 1537
  source 1..38: mol_type = other RNA

SEQ ID NO: 61547 - RNA, 38 nt, Synthetic Construct; identical to SEQ ID NO: 1537
  source 1..38: mol_type = other RNA

SEQ ID NO: 61548 - RNA, 15 nt, Synthetic Construct
  source 1..15: mol_type = other RNA
cagtgaaacgagtca

SEQ ID NO: 61549 - RNA, 18 nt, Synthetic Construct
  source 1..18: mol_type = other RNA
gctattgacgaccgtacc

SEQ ID NO: 61550 - RNA, 21 nt, Synthetic Construct
  source 1..21: mol_type = other RNA
ttatcagaatctccaggggta

SEQ ID NO: 61551 - RNA, 22 nt, Synthetic Construct
  source 1..22: mol_type = other RNA
tagcagcacgtacatattggcg

SEQ ID NO: 61552 - RNA, 22 nt, Synthetic Construct
  source 1..22: mol_type = other RNA
tagcagcacgtacatattggcg

SEQ ID NO: 61553 - RNA, 22 nt, Synthetic Construct
  source 1..22: mol_type = other RNA
cattgcacttgtctcggtccga

SEQ ID NO: 61554 - RNA, 22 nt, Synthetic Construct
  source 1..22: mol_type = other RNA
tgaggaagtaggttgtgtggtt

SEQ ID NO: 61555 - RNA, 22 nt, Synthetic Construct
  source 1..22: mol_type = other RNA
tgaggaagtaggttgtgtggtt

SEQ ID NO: 61556 - RNA, 22 nt, Synthetic Construct
  source 1..22: mol_type = other RNA
gcactctaatgagactgccggt

SEQ ID NO: 61557 - RNA, 22 nt, Synthetic Construct
  source 1..22: mol_type = other RNA
gcactctaatgagactgccggt

SEQ ID NO: 61558 - RNA, 24 nt, Synthetic Construct
  source 1..24: mol_type = other RNA
gggttgtaaaccgcttttgtcagg

SEQ ID NO: 61559 - RNA, 36 nt, Synthetic Construct; identical to SEQ ID NO: 744
  source 1..36: mol_type = other RNA

SEQ ID NO: 61560 - RNA, 21 nt, Synthetic Construct
  source 1..21: mol_type = other RNA
tttgttcgttcggctcgcgtg

SEQ ID NO: 61561 - RNA, 21 nt, Synthetic Construct
  source 1..21: mol_type = other RNA
tttgttcgttcggctcgcgtg

SEQ ID NO: 61562 - RNA, 25 nt, Synthetic Construct
  source 1..25: mol_type = other RNA
caaagtgctgttcgtgcaggtagtt

SEQ ID NO: 61563 - RNA, 21 nt, Synthetic Construct
  source 1..21: mol_type = other RNA
tcctgaactgagctgccccga

SEQ ID NO: 61564 - RNA, 22 nt, Synthetic Construct
  source 1..22: mol_type = other RNA
cattattacttttggtacgcga

SEQ ID NO: 61565 - RNA, 22 nt, Synthetic Construct
  source 1..22: mol_type = other RNA
cattattacttttggtacgcga

SEQ ID NO: 61566 - RNA, 22 nt, Synthetic Construct
  source 1..22: mol_type = other RNA
tagcagcacgtaaatattgacg

SEQ ID NO: 61567 - RNA, 22 nt, Synthetic Construct
  source 1..22: mol_type = other RNA
tcactgatcgagtcgtcctgcg

SEQ ID NO: 61568 - RNA, 27 nt, Synthetic Construct
  source 1..27: mol_type = other RNA
ccccccactgctaaattagactggctt

SEQ ID NO: 61569 - RNA, 27 nt, Synthetic Construct
  source 1..27: mol_type = other RNA
ccccccactgctaaattagactggctt

SEQ ID NO: 61570 - RNA, 16 nt, Synthetic Construct
  source 1..16: mol_type = other RNA
tcgtgacgatagtgca

SEQ ID NO: 61571 - RNA, 16 nt, Synthetic Construct
  source 1..16: mol_type = other RNA
tcgtgacgatagtgca

SEQ ID NO: 61572 - RNA, 26 nt, Synthetic Construct
  source 1..26: mol_type = other RNA
tcccacatggtctagcggttaggatt

SEQ ID NO: 61573 - RNA, 26 nt, Synthetic Construct
  source 1..26: mol_type = other RNA
tcccacatggtctagcggttaggatt

SEQ ID NO: 61574 - RNA, 21 nt, Synthetic Construct
  source 1..21: mol_type = other RNA
cctctgggcccttcctccagt

SEQ ID NO: 61575 - RNA, 21 nt, Synthetic Construct
  source 1..21: mol_type = other RNA
cctctgggcccttcctccagt

SEQ ID NO: 61576 - RNA, 22 nt, Synthetic Construct
  source 1..22: mol_type = other RNA
gagaactgaattccatgggttg

SEQ ID NO: 61577 - RNA, 22 nt, Synthetic Construct
  source 1..22: mol_type = other RNA
gagaactgaattccatgggttg

SEQ ID NO: 61578 - RNA, 17 nt, Synthetic Construct
  source 1..17: mol_type = other RNA
tcagtagctcgaggaaa

SEQ ID NO: 61579 - RNA, 23 nt, Synthetic Construct
  source 1..23: mol_type = other RNA
ggcagcattgtacagggctatgt

SEQ ID NO: 61580 - RNA, 23 nt, Synthetic Construct
  source 1..23: mol_type = other RNA
ggcagcattgtacagggctatgt

SEQ ID NO: 61581 - RNA, 34 nt, Synthetic Construct; identical to SEQ ID NO: 54265
  source 1..34: mol_type = other RNA

SEQ ID NO: 61582 - RNA, 17 nt, Synthetic Construct
  source 1..17: mol_type = other RNA
tagggaacgtgagctgg

SEQ ID NO: 61583 - RNA, 25 nt, Synthetic Construct
  source 1..25: mol_type = other RNA
tgtaaacatccttgactggaagctt

SEQ ID NO: 61584 - RNA, 25 nt, Synthetic Construct
  source 1..25: mol_type = other RNA
tgtaaacatccttgactggaagctt

SEQ ID NO: 61585 - RNA, 17 nt, Synthetic Construct
  source 1..17: mol_type = other RNA
cacggcccagactccta

SEQ ID NO: 61586 - RNA, 25 nt, Synthetic Construct
  source 1..25: mol_type = other RNA
gactcttagcggtggatcactcggc

SEQ ID NO: 61587 - RNA, 20 nt, Synthetic Construct
  source 1..20: mol_type = other RNA
tctcccaacccttgtaccag

SEQ ID NO: 61588 - RNA, 20 nt, Synthetic Construct
  source 1..20: mol_type = other RNA
tctcccaacccttgtaccag

SEQ ID NO: 61589 - RNA, 20 nt, Synthetic Construct
  source 1..20: mol_type = other RNA
tagcaccatttgaaatcagt

SEQ ID NO: 61590 - RNA, 23 nt, Synthetic Construct
  source 1..23: mol_type = other RNA
agcaggacggtggccatggaagt

SEQ ID NO: 61591 - RNA, 23 nt, Synthetic Construct
  source 1..23: mol_type = other RNA
agcaggacggtggccatggaagt

SEQ ID NO: 61592 - RNA, 15 nt, Synthetic Construct
  source 1..15: mol_type = other RNA
gtcaggatggccgag

SEQ ID NO: 61593 - RNA, 15 nt, Synthetic Construct
  source 1..15: mol_type = other RNA
gtcaggatggccgag

SEQ ID NO: 61594 - RNA, 22 nt, Synthetic Construct
  source 1..22: mol_type = other RNA
tgtggtagtaggttgtatagtt

SEQ ID NO: 61595 - RNA, 22 nt, Synthetic Construct
  source 1..22: mol_type = other RNA
tgtggtagtaggttgtatagtt

SEQ ID NO: 61596 - RNA, 21 nt, Synthetic Construct
  source 1..21: mol_type = other RNA
tgaggtaataggttgtgtggt

SEQ ID NO: 61597 - RNA, 22 nt, Synthetic Construct
  source 1..22: mol_type = other RNA
tgagctagtagtttgtgctgtt

SEQ ID NO: 61598 - RNA, 22 nt, Synthetic Construct
  source 1..22: mol_type = other RNA
tgagctagtagtttgtgctgtt

SEQ ID NO: 61599 - RNA, 22 nt, Synthetic Construct
  source 1..22: mol_type = other RNA
tagcagcacgtaaatattggca

SEQ ID NO: 61600 - RNA, 22 nt, Synthetic Construct
  source 1..22: mol_type = other RNA
tagcagcacgtaaatattggca

SEQ ID NO: 61601 - RNA, 19 nt, Synthetic Construct
  source 1..19: mol_type = other RNA
cggaagaaggggtgcctgg

SEQ ID NO: 61602 - RNA, 19 nt, Synthetic Construct
  source 1..19: mol_type = other RNA
cggaagaaggggtgcctgg

SEQ ID NO: 61603 - RNA, 23 nt, Synthetic Construct
  source 1..23: mol_type = other RNA
tagcagcacataatggtttgtgg

SEQ ID NO: 61604 - RNA, 23 nt, Synthetic Construct
  source 1..23: mol_type = other RNA
tagcagcacataatggtttgtgg

SEQ ID NO: 61605 - RNA, 21 nt, Synthetic Construct
  source 1..21: mol_type = other RNA
ccccttggggttgtaggacca

SEQ ID NO: 61606 - RNA, 21 nt, Synthetic Construct
  source 1..21: mol_type = other RNA
ccccttggggttgtaggacca

SEQ ID NO: 61607 - RNA, 21 nt, Synthetic Construct
  source 1..21: mol_type = other RNA
taactccttaagcgaattcgc

SEQ ID NO: 61608 - RNA, 21 nt, Synthetic Construct
  source 1..21: mol_type = other RNA
taactccttaagcgaattcgc

SEQ ID NO: 61609 - RNA, 20 nt, Synthetic Construct
  source 1..20: mol_type = other RNA
tagcaccatctgaaatcggt

SEQ ID NO: 61610 - RNA, 25 nt, Synthetic Construct
  source 1..25: mol_type = other RNA
ttgaggatatgagatcgaggcgaca

SEQ ID NO: 61611 - RNA, 25 nt, Synthetic Construct
  source 1..25: mol_type = other RNA
ttgaggatatgagatcgaggcgaca

SEQ ID NO: 61612 - RNA, 25 nt, Synthetic Construct
  source 1..25: mol_type = other RNA
ccccactgctaaatttgactggctt

SEQ ID NO: 61613 - RNA, 33 nt, Synthetic Construct; identical to SEQ ID NO: 1982
  source 1..33: mol_type = other RNA

SEQ ID NO: 61614 - RNA, 24 nt, Synthetic Construct
  source 1..24: mol_type = other RNA
cgactcttagcggtggatcactcg

SEQ ID NO: 61615 - RNA, 24 nt, Synthetic Construct
  source 1..24: mol_type = other RNA
tgaggtagtaggttgtgtggttat

SEQ ID NO: 61616 - RNA, 24 nt, Synthetic Construct
  source 1..24: mol_type = other RNA
tgaggtagtaggttgtgtggttat

SEQ ID NO: 61617 - RNA, 22 nt, Synthetic Construct
  source 1..22: mol_type = other RNA
tgaggtagtagttcgtgctgtt

SEQ ID NO: 61618 - RNA, 22 nt, Synthetic Construct
  source 1..22: mol_type = other RNA
tgaggtagtagttcgtgctgtt

SEQ ID NO: 61619 - RNA, 22 nt, Synthetic Construct
  source 1..22: mol_type = other RNA
tagcaacacgtaaatattggcg

SEQ ID NO: 61620 - RNA, 20 nt, Synthetic Construct
  source 1..20: mol_type = other RNA
tgaggtagtaggctgtatag

SEQ ID NO: 61621 - RNA, 27 nt, Synthetic Construct
  source 1..27: mol_type = other RNA
ccccccactgctaaaattgactggctt

SEQ ID NO: 61622 - RNA, 27 nt, Synthetic Construct
  source 1..27: mol_type = other RNA
ccccccactgctaaaattgactggctt

SEQ ID NO: 61623 - RNA, 31 nt, Synthetic Construct; identical to SEQ ID NO: 960
  source 1..31: mol_type = other RNA

SEQ ID NO: 61624 - RNA, 31 nt, Synthetic Construct; identical to SEQ ID NO: 960
  source 1..31: mol_type = other RNA

SEQ ID NO: 61625 - RNA, 20 nt, Synthetic Construct
  source 1..20: mol_type = other RNA
gaatcgctagtaatcgcgga

SEQ ID NO: 61626 - RNA, 22 nt, Synthetic Construct
  source 1..22: mol_type = other RNA
tgaggtagtagattgtatagct

SEQ ID NO: 61627 - RNA, 22 nt, Synthetic Construct
  source 1..22: mol_type = other RNA
tgaggtagtagattgtatagct

SEQ ID NO: 61628 - RNA, 22 nt, Synthetic Construct
  source 1..22: mol_type = other RNA
tctgcccagtgctctgaatgtc

SEQ ID NO: 61629 - RNA, 22 nt, Synthetic Construct
  source 1..22: mol_type = other RNA
tctgcccagtgctctgaatgtc

SEQ ID NO: 61630 - RNA, 22 nt, Synthetic Construct
  source 1..22: mol_type = other RNA
tagcagcacgtaaatattcgcg

SEQ ID NO: 61631 - RNA, 32 nt, Synthetic Construct; identical to SEQ ID NO: 1675
  source 1..32: mol_type = other RNA

SEQ ID NO: 61632 - RNA, 32 nt, Synthetic Construct; identical to SEQ ID NO: 1675
  source 1..32: mol_type = other RNA

SEQ ID NO: 61633 - RNA, 23 nt, Synthetic Construct
  source 1..23: mol_type = other RNA
accctgtagatccgaatttgtgt

SEQ ID NO: 61634 - RNA, 23 nt, Synthetic Construct
  source 1..23: mol_type = other RNA
accctgtagatccgaatttgtgt

SEQ ID NO: 61635 - RNA, 21 nt, Synthetic Construct
  source 1..21: mol_type = other RNA
tggggggcagagagcgagact

SEQ ID NO: 61636 - RNA, 21 nt, Synthetic Construct
  source 1..21: mol_type = other RNA
tacgcctgtctgagcgtcgct

SEQ ID NO: 61637 - RNA, 23 nt, Synthetic Construct
  source 1..23: mol_type = other RNA
tcctgtactgagctgccctgaga

SEQ ID NO: 61638 - RNA, 25 nt, Synthetic Construct
  source 1..25: mol_type = other RNA
ttgaggatatgggatcgagacgaca

SEQ ID NO: 61639 - RNA, 25 nt, Synthetic Construct
  source 1..25: mol_type = other RNA
ttgaggatatgggatcgagacgaca

SEQ ID NO: 61640 - RNA, 22 nt, Synthetic Construct
  source 1..22: mol_type = other RNA
tgagaactgaattccatgggct

SEQ ID NO: 61641 - RNA, 22 nt, Synthetic Construct
  source 1..22: mol_type = other RNA
tgagaactgaattccatgggct

SEQ ID NO: 61642 - RNA, 20 nt, Synthetic Construct
  source 1..20: mol_type = other RNA
tgaggaagtaggttgtgtgg

SEQ ID NO: 61643 - RNA, 20 nt, Synthetic Construct
  source 1..20: mol_type = other RNA
tgaggaagtaggttgtgtgg

SEQ ID NO: 61644 - RNA, 24 nt, Synthetic Construct
  source 1..24: mol_type = other RNA
tgaggtagtaggttgtgtggttat

SEQ ID NO: 61645 - RNA, 24 nt, Synthetic Construct
  source 1..24: mol_type = other RNA
tgaggtagtaggttgtgtggttat

SEQ ID NO: 61646 - RNA, 26 nt, Synthetic Construct
  source 1..26: mol_type = other RNA
gacttaccaaacctatgcaaactccg

SEQ ID NO: 61647 - RNA, 23 nt, Synthetic Construct
  source 1..23: mol_type = other RNA
tcccccaggtgtgattctgattt

SEQ ID NO: 61648 - RNA, 23 nt, Synthetic Construct
  source 1..23: mol_type = other RNA
tcccccaggtgtgattctgattt

SEQ ID NO: 61649 - RNA, 34 nt, Synthetic Construct; identical to SEQ ID NO: 35301
  source 1..34: mol_type = other RNA

SEQ ID NO: 61650 - RNA, 35 nt, Synthetic Construct; identical to SEQ ID NO: 2548
  source 1..35: mol_type = other RNA

SEQ ID NO: 61651 - RNA, 17 nt, Synthetic Construct
  source 1..17: mol_type = other RNA
ctgcggaaggatcattg

SEQ ID NO: 61652 - RNA, 17 nt, Synthetic Construct
  source 1..17: mol_type = other RNA
ctgcggaaggatcattg

SEQ ID NO: 61653 - RNA, 22 nt, Synthetic Construct
  source 1..22: mol_type = other RNA
aagcatatcgagcctgagaaca

SEQ ID NO: 61654 - RNA, 22 nt, Synthetic Construct
  source 1..22: mol_type = other RNA
aagcatatcgagcctgagaaca

SEQ ID NO: 61655 - RNA, 27 nt, Synthetic Construct
  source 1..27: mol_type = other RNA
ccctccactgctaaatttgactggctt

SEQ ID NO: 61656 - RNA, 27 nt, Synthetic Construct
  source 1..27: mol_type = other RNA
ccctccactgctaaatttgactggctt

SEQ ID NO: 61657 - RNA, 22 nt, Synthetic Construct
  source 1..22: mol_type = other RNA
cggctctgggtctgtggggagt

SEQ ID NO: 61658 - RNA, 22 nt, Synthetic Construct
  source 1..22: mol_type = other RNA
tgagaactgaattccatgggta

SEQ ID NO: 61659 - RNA, 44 nt, Synthetic Construct; identical to SEQ ID NO: 5536
  source 1..44: mol_type = other RNA

SEQ ID NO: 61660 - RNA, 31 nt, Synthetic Construct; identical to SEQ ID NO: 32560
  source 1..31: mol_type = other RNA

SEQ ID NO: 61661 - RNA, 31 nt, Synthetic Construct; identical to SEQ ID NO: 32560
  source 1..31: mol_type = other RNA

SEQ ID NO: 61662 - RNA, 22 nt, Synthetic Construct
  source 1..22: mol_type = other RNA
tgaggtagtagtttgtgctatt

SEQ ID NO: 61663 - RNA, 31 nt, Synthetic Construct; identical to SEQ ID NO: 960
  source 1..31: mol_type = other RNA

SEQ ID NO: 61664 - RNA, 35 nt, Synthetic Construct; identical to SEQ ID NO: 1490
  source 1..35: mol_type = other RNA

SEQ ID NO: 61665 - RNA, 35 nt, Synthetic Construct; identical to SEQ ID NO: 1490
  source 1..35: mol_type = other RNA

SEQ ID NO: 61666 - RNA, 20 nt, Synthetic Construct
  source 1..20: mol_type = other RNA
tagcagcacataatggtttg

SEQ ID NO: 61667 - RNA, 20 nt, Synthetic Construct
  source 1..20: mol_type = other RNA
tgtcttgcaggccgtcatgc

SEQ ID NO: 61668 - RNA, 20 nt, Synthetic Construct
  source 1..20: mol_type = other RNA
tgtcttgcaggccgtcatgc

SEQ ID NO: 61669 - RNA, 16 nt, Synthetic Construct
  source 1..16: mol_type = other RNA
ctgcctcagcgtcggt

SEQ ID NO: 61670 - RNA, 16 nt, Synthetic Construct
  source 1..16: mol_type = other RNA
ctgcctcagcgtcggt

SEQ ID NO: 61671 - RNA, 22 nt, Synthetic Construct
  source 1..22: mol_type = other RNA
tgaggtagtagtttgtgatgtt

SEQ ID NO: 61672 - RNA, 22 nt, Synthetic Construct
  source 1..22: mol_type = other RNA
tgaggtagtagtttgtgatgtt

SEQ ID NO: 61673 - RNA, 23 nt, Synthetic Construct
  source 1..23: mol_type = other RNA
tgtcagtttgccaaataccccaa

SEQ ID NO: 61674 - RNA, 23 nt, Synthetic Construct
  source 1..23: mol_type = other RNA
tgtcagtttgccaaataccccaa

SEQ ID NO: 61675 - RNA, 21 nt, Synthetic Construct
  source 1..21: mol_type = other RNA
gactatagaactttccccctc

SEQ ID NO: 61676 - RNA, 22 nt, Synthetic Construct
  source 1..22: mol_type = other RNA
tcgtaccgcgagtaataatgcg

SEQ ID NO: 61677 - RNA, 23 nt, Synthetic Construct
  source 1..23: mol_type = other RNA
acagtagtctgcacattggttaa

SEQ ID NO: 61678 - RNA, 22 nt, Synthetic Construct
  source 1..22: mol_type = other RNA
tcgtaccgcgagtaataatgcg

SEQ ID NO: 61679 - RNA, 21 nt, Synthetic Construct
  source 1..21: mol_type = other RNA
tcttggagtaggtcattgggt

SEQ ID NO: 61680 - RNA, 20 nt, Synthetic Construct
  source 1..20: mol_type = other RNA
tattgcacattactaagttg

SEQ ID NO: 61681 - RNA, 20 nt, Synthetic Construct
  source 1..20: mol_type = other RNA
tattgcacattactaagttg

SEQ ID NO: 61682 - RNA, 21 nt, Synthetic Construct
  source 1..21: mol_type = other RNA
tgtgactggttgaccagaggg

SEQ ID NO: 61683 - RNA, 19 nt, Synthetic Construct
  source 1..19: mol_type = other RNA
tagcagcacgtaaatattg

SEQ ID NO: 61684 - RNA, 22 nt, Synthetic Construct
  source 1..22: mol_type = other RNA
tgaggtagtaggttgtgaggtt

SEQ ID NO: 61685 - RNA, 21 nt, Synthetic Construct
  source 1..21: mol_type = other RNA
tcctgtactgagttgccccga

SEQ ID NO: 61686 - RNA, 23 nt, Synthetic Construct
  source 1..23: mol_type = other RNA
caaagtgcttacagtgcaggtag

SEQ ID NO: 61687 - RNA, 22 nt, Synthetic Construct
  source 1..22: mol_type = other RNA
tagcttatcagactgatgttga

SEQ ID NO: 61688 - RNA, 25 nt, Synthetic Construct
  source 1..25: mol_type = other RNA
ttgaggatatgagatcgagacaaca

SEQ ID NO: 61689 - RNA, 22 nt, Synthetic Construct
  source 1..22: mol_type = other RNA
tagcagcacgttaatattggcg

SEQ ID NO: 61690 - RNA, 22 nt, Synthetic Construct
  source 1..22: mol_type = other RNA
tagcagcacgttaatattggcg

SEQ ID NO: 61691 - RNA, 28 nt, Synthetic Construct
  source 1..28: mol_type = other RNA
tgttggttcaagcgtgtagtcgtgctct

SEQ ID NO: 61692 - RNA, 22 nt, Synthetic Construct
  source 1..22: mol_type = other RNA
tattgcacttgtcccggcccgt

SEQ ID NO: 61693 - RNA, 22 nt, Synthetic Construct
  source 1..22: mol_type = other RNA
tattgcacttgtcccggcccgt

SEQ ID NO: 61694 - RNA, 32 nt, Synthetic Construct; identical to SEQ ID NO: 1237
  source 1..32: mol_type = other RNA

SEQ ID NO: 61695 - RNA, 23 nt, Synthetic Construct
  source 1..23: mol_type = other RNA
caaagtgccgttcgtgcaggtag

SEQ ID NO: 61696 - RNA, 23 nt, Synthetic Construct
  source 1..23: mol_type = other RNA
caaagtgccgttcgtgcaggtag

SEQ ID NO: 61697 - RNA, 20 nt, Synthetic Construct
  source 1..20: mol_type = other RNA
aaccgggcggaaacaccatt

SEQ ID NO: 61698 - RNA, 20 nt, Synthetic Construct
  source 1..20: mol_type = other RNA
aaccgggcggaaacaccatt

SEQ ID NO: 61699 - RNA, 21 nt, Synthetic Construct
  source 1..21: mol_type = other RNA
aaaagctgggttgagagggcg

SEQ ID NO: 61700 - RNA, 21 nt, Synthetic Construct
  source 1..21: mol_type = other RNA
aaaagctgggttgagagggcg

SEQ ID NO: 61701 - RNA, 23 nt, Synthetic Construct
  source 1..23: mol_type = other RNA
tggcaatacgacgtacttagtgt

SEQ ID NO: 61702 - RNA, 24 nt, Synthetic Construct
  source 1..24: mol_type = other RNA
agtaaacatccttgactggaagct

SEQ ID NO: 61703 - RNA, 16 nt, Synthetic Construct
  source 1..16: mol_type = other RNA
gtctacgaccatacca

SEQ ID NO: 61704 - RNA, 27 nt, Synthetic Construct
  source 1..27: mol_type = other RNA
ccccccactgctaaaattgactggctt

SEQ ID NO: 61705 - RNA, 16 nt, Synthetic Construct
  source 1..16: mol_type = other RNA
tccggatcgtagtctg

SEQ ID NO: 61706 - RNA, 22 nt, Synthetic Construct
  source 1..22: mol_type = other RNA
gcctgctggggtggaacctggt

SEQ ID NO: 61707 - RNA, 15 nt, Synthetic Construct
  source 1..15: mol_type = other RNA
cgatatggcatgaga

SEQ ID NO: 61708 - RNA, 15 nt, Synthetic Construct
  source 1..15: mol_type = other RNA
cgatatggcatgaga

SEQ ID NO: 61709 - RNA, 22 nt, Synthetic Construct
  source 1..22: mol_type = other RNA
taactccttaagcgaatctcga

SEQ ID NO: 61710 - RNA, 22 nt, Synthetic Construct
  source 1..22: mol_type = other RNA
taactccttaagcgaatctcga

SEQ ID NO: 61711 - RNA, 22 nt, Synthetic Construct
  source 1..22: mol_type = other RNA
tgaggtagtaggatgtgtggtt

SEQ ID NO: 61712 - RNA, 22 nt, Synthetic Construct
  source 1..22: mol_type = other RNA
ccacagggtagaaccacggact

SEQ ID NO: 61713 - RNA, 29 nt, Synthetic Construct
  source 1..29: mol_type = other RNA
cgactcttagcggtggatcactcggctcg

SEQ ID NO: 61714 - RNA, 32 nt, Synthetic Construct; identical to SEQ ID NO: 4734
  source 1..32: mol_type = other RNA

SEQ ID NO: 61715 - RNA, 32 nt, Synthetic Construct; identical to SEQ ID NO: 4734
  source 1..32: mol_type = other RNA

SEQ ID NO: 61716 - RNA, 22 nt, Synthetic Construct
  source 1..22: mol_type = other RNA
tagcagcgcgtaaatattggcg

SEQ ID NO: 61717 - RNA, 22 nt, Synthetic Construct
  source 1..22: mol_type = other RNA
tagcagcgcgtaaatattggcg

SEQ ID NO: 61718 - RNA, 22 nt, Synthetic Construct
  source 1..22: mol_type = other RNA
cgaggtagtagtttgtgctgtt

SEQ ID NO: 61719 - RNA, 22 nt, Synthetic Construct
  source 1..22: mol_type = other RNA
tcgtaccgtgagtagtaatgcg

SEQ ID NO: 61720 - RNA, 23 nt, Synthetic Construct
  source 1..23: mol_type = other RNA
atcacattgccagggattaccac

SEQ ID NO: 61721 - RNA, 23 nt, Synthetic Construct
  source 1..23: mol_type = other RNA
atcacattgccagggattaccac

SEQ ID NO: 61722 - RNA, 23 nt, Synthetic Construct
  source 1..23: mol_type = other RNA
caaagtgctgttcatgcaggtag

SEQ ID NO: 61723 - RNA, 23 nt, Synthetic Construct
  source 1..23: mol_type = other RNA
caaagtgctgttcatgcaggtag

SEQ ID NO: 61724 - RNA, 22 nt, Synthetic Construct
  source 1..22: mol_type = other RNA
gaagttgttcgtggtggattcg

SEQ ID NO: 61725 - RNA, 26 nt, Synthetic Construct
  source 1..26: mol_type = other RNA
agggctgggtcggtcgggctggggcg

SEQ ID NO: 61726 - RNA, 16 nt, Synthetic Construct
  source 1..16: mol_type = other RNA
gcaagaggtcagcggt

SEQ ID NO: 61727 - RNA, 16 nt, Synthetic Construct
  source 1..16: mol_type = other RNA
gcaagaggtcagcggt

SEQ ID NO: 61728 - RNA, 17 nt, Synthetic Construct
  source 1..17: mol_type = other RNA
cctcgcgcgattggagc

SEQ ID NO: 61729 - RNA, 17 nt, Synthetic Construct
  source 1..17: mol_type = other RNA
cctcgcgcgattggagc

SEQ ID NO: 61730 - RNA, 22 nt, Synthetic Construct
  source 1..22: mol_type = other RNA
taaggtagtaggttgtgtggtt

SEQ ID NO: 61731 - RNA, 22 nt, Synthetic Construct
  source 1..22: mol_type = other RNA
taaggtagtaggttgtgtggtt

SEQ ID NO: 61732 - RNA, 23 nt, Synthetic Construct
  source 1..23: mol_type = other RNA
agcagcattgtacagggctgtga

SEQ ID NO: 61733 - RNA, 23 nt, Synthetic Construct
  source 1..23: mol_type = other RNA
agcagcattgtacagggctgtga

SEQ ID NO: 61734 - RNA, 22 nt, Synthetic Construct
  source 1..22: mol_type = other RNA
tgaggtagtagtttgtgctggt

SEQ ID NO: 61735 - RNA, 23 nt, Synthetic Construct
  source 1..23: mol_type = other RNA
agcagcattgtacagggctacga

SEQ ID NO: 61736 - RNA, 22 nt, Synthetic Construct
  source 1..22: mol_type = other RNA
tattgcacttgtcccggcctat

SEQ ID NO: 61737 - RNA, 22 nt, Synthetic Construct
  source 1..22: mol_type = other RNA
tattgcacttgtcccggcctat

SEQ ID NO: 61738 - RNA, 26 nt, Synthetic Construct
  source 1..26: mol_type = other RNA
gatgcgtggtaggagagcgttctgta

SEQ ID NO: 61739 - RNA, 21 nt, Synthetic Construct
  source 1..21: mol_type = other RNA
tgaggtagtagattgtacagt

SEQ ID NO: 61740 - RNA, 21 nt, Synthetic Construct
  source 1..21: mol_type = other RNA
tgaggtagtagattgtacagt

SEQ ID NO: 61741 - RNA, 22 nt, Synthetic Construct
  source 1..22: mol_type = other RNA
taactacttaagcgaatctcgc

SEQ ID NO: 61742 - RNA, 22 nt, Synthetic Construct
  source 1..22: mol_type = other RNA
taactacttaagcgaatctcgc

SEQ ID NO: 61743 - RNA, 23 nt, Synthetic Construct
  source 1..23: mol_type = other RNA
ggctacattgtctgctgggtttc

SEQ ID NO: 61744 - RNA, 23 nt, Synthetic Construct
  source 1..23: mol_type = other RNA
ggctacattgtctgctgggtttc

SEQ ID NO: 61745 - RNA, 24 nt, Synthetic Construct
  source 1..24: mol_type = other RNA
taccacagggtagaaccacggatt

SEQ ID NO: 61746 - RNA, 24 nt, Synthetic Construct
  source 1..24: mol_type = other RNA
taccacagggtagaaccacggatt

SEQ ID NO: 61747 - RNA, 24 nt, Synthetic Construct
  source 1..24: mol_type = other RNA
tacagtagtctgcacattggttat

SEQ ID NO: 61748 - RNA, 17 nt, Synthetic Construct
  source 1..17: mol_type = other RNA
cttgaccgctctgacca

SEQ ID NO: 61749 - RNA, 22 nt, Synthetic Construct
  source 1..22: mol_type = other RNA
tgaggtagtaagttgtatagtt

SEQ ID NO: 61750 - RNA, 22 nt, Synthetic Construct
  source 1..22: mol_type = other RNA
tgaggtagtaagttgtatagtt

SEQ ID NO: 61751 - RNA, 23 nt, Synthetic Construct
  source 1..23: mol_type = other RNA
ttggtccccttcaaccagctgtt

SEQ ID NO: 61752 - RNA, 23 nt, Synthetic Construct
  source 1..23: mol_type = other RNA
tctttggttatctagctgtatga

SEQ ID NO: 61753 - RNA, 22 nt, Synthetic Construct
  source 1..22: mol_type = other RNA
tgacgtagtaggttgtatagtt

SEQ ID NO: 61754 - RNA, 22 nt, Synthetic Construct
  source 1..22: mol_type = other RNA
tgacgtagtaggttgtatagtt

SEQ ID NO: 61755 - RNA, 33 nt, Synthetic Construct; identical to SEQ ID NO: 56504
  source 1..33: mol_type = other RNA

SEQ ID NO: 61756 - RNA, 22 nt, Synthetic Construct
  source 1..22: mol_type = other RNA
cgagaactgaattccatgggtt

SEQ ID NO: 61757 - RNA, 22 nt, Synthetic Construct
  source 1..22: mol_type = other RNA
cgagaactgaattccatgggtt

SEQ ID NO: 61758 - RNA, 31 nt, Synthetic Construct; identical to SEQ ID NO: 39620
  source 1..31: mol_type = other RNA

SEQ ID NO: 61759 - RNA, 23 nt, Synthetic Construct
  source 1..23: mol_type = other RNA
tacagtactgtgataactgaaga

SEQ ID NO: 61760 - RNA, 23 nt, Synthetic Construct
  source 1..23: mol_type = other RNA
tacagtactgtgataactgaaga

SEQ ID NO: 61761 - RNA, 23 nt, Synthetic Construct
  source 1..23: mol_type = other RNA
cagagttctacagtccgacgatc

SEQ ID NO: 61762 - RNA, 23 nt, Synthetic Construct
  source 1..23: mol_type = other RNA
cagagttctacagtccgacgatc

SEQ ID NO: 61763 - RNA, 20 nt, Synthetic Construct
  source 1..20: mol_type = other RNA
tgtaaacatccttgactgga

SEQ ID NO: 61764 - RNA, 20 nt, Synthetic Construct
  source 1..20: mol_type = other RNA
tgtaaacatccttgactgga

SEQ ID NO: 61765 - RNA, 16 nt, Synthetic Construct
  source 1..16: mol_type = other RNA
cgctagtaatcgcgga

SEQ ID NO: 61766 - RNA, 22 nt, Synthetic Construct
  source 1..22: mol_type = other RNA
tcctgtactgagctgccccaag

SEQ ID NO: 61767 - RNA, 22 nt, Synthetic Construct
  source 1..22: mol_type = other RNA
tcctgtactgagctgccccaag

SEQ ID NO: 61768 - RNA, 22 nt, Synthetic Construct
  source 1..22: mol_type = other RNA
tgaggtagtagcttgtgctgtt

SEQ ID NO: 61769 - RNA, 17 nt, Synthetic Construct
  source 1..17: mol_type = other RNA
gccatgccgcgtgcggg

SEQ ID NO: 61770 - RNA, 22 nt, Synthetic Construct
  source 1..22: mol_type = other RNA
acagtagtctgcacattggtta

SEQ ID NO: 61771 - RNA, 15 nt, Synthetic Construct
  source 1..15: mol_type = other RNA
ggccgtcgtcagctc

SEQ ID NO: 61772 - RNA, 22 nt, Synthetic Construct
  source 1..22: mol_type = other RNA
cattgcacttgtctcggtctgg

SEQ ID NO: 61773 - RNA, 22 nt, Synthetic Construct
  source 1..22: mol_type = other RNA
cattgcacttgtctcggtctgg

SEQ ID NO: 61774 - RNA, 21 nt, Synthetic Construct
  source 1..21: mol_type = other RNA
tcctgtacagagctgccccga

SEQ ID NO: 61775 - RNA, 22 nt, Synthetic Construct
  source 1..22: mol_type = other RNA
tgaggtagtagattgaatagtt

SEQ ID NO: 61776 - RNA, 22 nt, Synthetic Construct
  source 1..22: mol_type = other RNA
tgaggtagtagattgaatagtt

SEQ ID NO: 61777 - RNA, 23 nt, Synthetic Construct
  source 1..23: mol_type = other RNA
tcctgaactgagctgccccgaga

SEQ ID NO: 61778 - RNA, 18 nt, Synthetic Construct
  source 1..18: mol_type = other RNA
aagcggtggatgatgtgg

SEQ ID NO: 61779 - RNA, 22 nt, Synthetic Construct
  source 1..22: mol_type = other RNA
tattgcactcgtcccggcctgt

SEQ ID NO: 61780 - RNA, 22 nt, Synthetic Construct
  source 1..22: mol_type = other RNA
tattgcactcgtcccggcctgt

SEQ ID NO: 61781 - RNA, 22 nt, Synthetic Construct
  source 1..22: mol_type = other RNA
tgaggtagtggtttgtgctgtt

SEQ ID NO: 61782 - RNA, 22 nt, Synthetic Construct
  source 1..22: mol_type = other RNA
gcactctaatgagactgccggt

SEQ ID NO: 61783 - RNA, 28 nt, Synthetic Construct
  source 1..28: mol_type = other RNA
gcattggtggttcagtggtagaattctc

SEQ ID NO: 61784 - RNA, 28 nt, Synthetic Construct
  source 1..28: mol_type = other RNA
gcattggtggttcagtggtagaattctc

SEQ ID NO: 61785 - RNA, 23 nt, Synthetic Construct
  source 1..23: mol_type = other RNA
tcccgtactgagctgccccgagt

SEQ ID NO: 61786 - RNA, 23 nt, Synthetic Construct
  source 1..23: mol_type = other RNA
caaagtgcttacagtgcaggtag

SEQ ID NO: 61787 - RNA, 22 nt, Synthetic Construct
  source 1..22: mol_type = other RNA
tgaggtagtagattatatagtt

SEQ ID NO: 61788 - RNA, 23 nt, Synthetic Construct
  source 1..23: mol_type = other RNA
cgactcttagcggtggatcactc

SEQ ID NO: 61789 - RNA, 23 nt, Synthetic Construct
  source 1..23: mol_type = other RNA
cgactcttagcggtggatcactc

SEQ ID NO: 61790 - RNA, 19 nt, Synthetic Construct
  source 1..19: mol_type = other RNA
tctaatgagactgccggtg

SEQ ID NO: 61791 - RNA, 19 nt, Synthetic Construct
  source 1..19: mol_type = other RNA
tctaatgagactgccggtg

SEQ ID NO: 61792 - RNA, 32 nt, Synthetic Construct; identical to SEQ ID NO: 8547
  source 1..32: mol_type = other RNA

SEQ ID NO: 61793 - RNA, 20 nt, Synthetic Construct
  source 1..20: mol_type = other RNA
aaacggcgggagtaactatg

SEQ ID NO: 61794 - RNA, 22 nt, Synthetic Construct
  source 1..22: mol_type = other RNA
ttcgagtaatccaggataggct

SEQ ID NO: 61795 - RNA, 22 nt, Synthetic Construct
  source 1..22: mol_type = other RNA
ttcgagtaatccaggataggct

SEQ ID NO: 61796 - RNA, 16 nt, Synthetic Construct
  source 1..16: mol_type = other RNA
caggacggtggccatg

SEQ ID NO: 61797 - RNA, 20 nt, Synthetic Construct
  source 1..20: mol_type = other RNA
tgaggtagtaggctgtatag

SEQ ID NO: 61798 - RNA, 41 nt, Synthetic Construct; identical to SEQ ID NO: 8929
  source 1..41: mol_type = other RNA

SEQ ID NO: 61799 - RNA, 41 nt, Synthetic Construct; identical to SEQ ID NO: 8929
  source 1..41: mol_type = other RNA

SEQ ID NO: 61800 - RNA, 21 nt, Synthetic Construct
  source 1..21: mol_type = other RNA
tgaggtagtagattgtacagt

SEQ ID NO: 61801 - RNA, 28 nt, Synthetic Construct
  source 1..28: mol_type = other RNA
gtggcattgccgagtagctaagtgcgga

SEQ ID NO: 61802 - RNA, 31 nt, Synthetic Construct; identical to SEQ ID NO: 37496
  source 1..31: mol_type = other RNA

SEQ ID NO: 61803 - RNA, 34 nt, Synthetic Construct; identical to SEQ ID NO: 6757
  source 1..34: mol_type = other RNA

SEQ ID NO: 61804 - RNA, 22 nt, Synthetic Construct
  source 1..22: mol_type = other RNA
tagcagcacgtaaatataggcg

SEQ ID NO: 61805 - RNA, 19 nt, Synthetic Construct
  source 1..19: mol_type = other RNA
tgtctgcctcagcgtcggt

SEQ ID NO: 61806 - RNA, 19 nt, Synthetic Construct
  source 1..19: mol_type = other RNA
tgtctgcctcagcgtcggt

SEQ ID NO: 61807 - RNA, 23 nt, Synthetic Construct
  source 1..23: mol_type = other RNA
tagcagcacataatggtttgtgg

SEQ ID NO: 61808 - RNA, 23 nt, Synthetic Construct
  source 1..23: mol_type = other RNA
tagcagcacataatggtttgtgg

SEQ ID NO: 61809 - RNA, 24 nt, Synthetic Construct
  source 1..24: mol_type = other RNA
tcctccctcgggagggcgcgcggg

SEQ ID NO: 61810 - RNA, 24 nt, Synthetic Construct
  source 1..24: mol_type = other RNA
tcctccctcgggagggcgcgcggg

SEQ ID NO: 61811 - RNA, 18 nt, Synthetic Construct
  source 1..18: mol_type = other RNA
acggcgggagtaactatg

SEQ ID NO: 61812 - RNA, 22 nt, Synthetic Construct
  source 1..22: mol_type = other RNA
tcgtaccgtgagtagtaatgcg

SEQ ID NO: 61813 - RNA, 22 nt, Synthetic Construct
  source 1..22: mol_type = other RNA
tgagaactgaattccatgggtt

SEQ ID NO: 61814 - RNA, 22 nt, Synthetic Construct
  source 1..22: mol_type = other RNA
tgagaactgaattccatgggtt

SEQ ID NO: 61815 - RNA, 19 nt, Synthetic Construct
  source 1..19: mol_type = other RNA
tagcagcacatcatggttt

SEQ ID NO: 61816 - RNA, 19 nt, Synthetic Construct
  source 1..19: mol_type = other RNA
tagcagcacatcatggttt

SEQ ID NO: 61817 - RNA, 31 nt, Synthetic Construct; identical to SEQ ID NO: 9212
  source 1..31: mol_type = other RNA

SEQ ID NO: 61818 - RNA, 31 nt, Synthetic Construct; identical to SEQ ID NO: 9212
  source 1..31: mol_type = other RNA

SEQ ID NO: 61819 - RNA, 22 nt, Synthetic Construct
  source 1..22: mol_type = other RNA
tcactgatcgagtcgtcctgcg

SEQ ID NO: 61820 - RNA, 22 nt, Synthetic Construct
  source 1..22: mol_type = other RNA
tcactgatcgagtcgtcctgcg

SEQ ID NO: 61821 - RNA, 21 nt, Synthetic Construct
  source 1..21: mol_type = other RNA
ctggactgaagctccttgagg

SEQ ID NO: 61822 - RNA, 21 nt, Synthetic Construct
  source 1..21: mol_type = other RNA
tagcaccatctgaaatcggta

SEQ ID NO: 61823 - RNA, 21 nt, Synthetic Construct
  source 1..21: mol_type = other RNA
tgaggtagtagtctgtgctgt

SEQ ID NO: 61824 - RNA, 21 nt, Synthetic Construct
  source 1..21: mol_type = other RNA
tgaggtagtagtctgtgctgt

SEQ ID NO: 61825 - RNA, 22 nt, Synthetic Construct
  source 1..22: mol_type = other RNA
tattgcacatgtcccggcctgt

SEQ ID NO: 61826 - RNA, 19 nt, Synthetic Construct
  source 1..19: mol_type = other RNA
gcgccgatgatagtgcgga

SEQ ID NO: 61827 - RNA, 20 nt, Synthetic Construct
  source 1..20: mol_type = other RNA
caggacagtgaaacgagtca

SEQ ID NO: 61828 - RNA, 23 nt, Synthetic Construct
  source 1..23: mol_type = other RNA
ctagcaccatctgaaatcggtta

SEQ ID NO: 61829 - RNA, 23 nt, Synthetic Construct
  source 1..23: mol_type = other RNA
ctagcaccatctgaaatcggtta

SEQ ID NO: 61830 - RNA, 20 nt, Synthetic Construct
  source 1..20: mol_type = other RNA
tgaggggcagagagcgagac

SEQ ID NO: 61831 - RNA, 23 nt, Synthetic Construct
  source 1..23: mol_type = other RNA
tgaggtagtaggttgtatggtta

SEQ ID NO: 61832 - RNA, 23 nt, Synthetic Construct
  source 1..23: mol_type = other RNA
tgaggtagtaggttgtatggtta

SEQ ID NO: 61833 - RNA, 21 nt, Synthetic Construct
  source 1..21: mol_type = other RNA
ggaggtagtaggttgtgtggt

SEQ ID NO: 61834 - RNA, 21 nt, Synthetic Construct
  source 1..21: mol_type = other RNA
ggaggtagtaggttgtgtggt

SEQ ID NO: 61835 - RNA, 19 nt, Synthetic Construct
  source 1..19: mol_type = other RNA
agctacattgtctgctggg

SEQ ID NO: 61836 - RNA, 22 nt, Synthetic Construct
  source 1..22: mol_type = other RNA
cattattacttttggtacgcga

SEQ ID NO: 61837 - RNA, 22 nt, Synthetic Construct
  source 1..22: mol_type = other RNA
cattattacttttggtacgcga

SEQ ID NO: 61838 - RNA, 16 nt, Synthetic Construct
  source 1..16: mol_type = other RNA
gactacggccatacca

SEQ ID NO: 61839 - RNA, 16 nt, Synthetic Construct
  source 1..16: mol_type = other RNA
gactacggccatacca

SEQ ID NO: 61840 - RNA, 22 nt, Synthetic Construct
  source 1..22: mol_type = other RNA
tagcagcacgtaaatattagcg

SEQ ID NO: 61841 - RNA, 30 nt, Synthetic Construct; identical to SEQ ID NO: 6467
  source 1..30: mol_type = other RNA

SEQ ID NO: 61842 - RNA, 23 nt, Synthetic Construct
  source 1..23: mol_type = other RNA
ggctcggtctgaggcccctcagt

SEQ ID NO: 61843 - RNA, 23 nt, Synthetic Construct
  source 1..23: mol_type = other RNA
ggctcggtctgaggcccctcagt

SEQ ID NO: 61844 - RNA, 27 nt, Synthetic Construct
  source 1..27: mol_type = other RNA
ccccccactgctaaatttgattggctt

SEQ ID NO: 61845 - RNA, 16 nt, Synthetic Construct
  source 1..16: mol_type = other RNA
gaccctgttgagcttg

SEQ ID NO: 61846 - RNA, 23 nt, Synthetic Construct
  source 1..23: mol_type = other RNA
taaagtgcttatagtgcaggtag

SEQ ID NO: 61847 - RNA, 23 nt, Synthetic Construct
  source 1..23: mol_type = other RNA
taaagtgcttatagtgcaggtag

SEQ ID NO: 61848 - RNA, 22 nt, Synthetic Construct
  source 1..22: mol_type = other RNA
ccagtgcactacagaactttgt

SEQ ID NO: 61849 - RNA, 23 nt, Synthetic Construct
  source 1..23: mol_type = other RNA
caacggaatcccaaaagcagccg

SEQ ID NO: 61850 - RNA, 21 nt, Synthetic Construct
  source 1..21: mol_type = other RNA
aatgacacgatcactcccgtt

SEQ ID NO: 61851 - RNA, 21 nt, Synthetic Construct
  source 1..21: mol_type = other RNA
aatgacacgatcactcccgtt

SEQ ID NO: 61852 - RNA, 26 nt, Synthetic Construct
  source 1..26: mol_type = other RNA
tgaggtagtaggttgtgtggtttttt

SEQ ID NO: 61853 - RNA, 21 nt, Synthetic Construct
  source 1..21: mol_type = other RNA
tgaggtagtaggttgcgtggt

SEQ ID NO: 61854 - RNA, 23 nt, Synthetic Construct
  source 1..23: mol_type = other RNA
tccagtactgagctgccccgaga

SEQ ID NO: 61855 - RNA, 23 nt, Synthetic Construct
  source 1..23: mol_type = other RNA
tccagtactgagctgccccgaga

SEQ ID NO: 61856 - RNA, 30 nt, Synthetic Construct; identical to SEQ ID NO: 2308
  source 1..30: mol_type = other RNA

SEQ ID NO: 61857 - RNA, 23 nt, Synthetic Construct
  source 1..23: mol_type = other RNA
atatcggaacgtgcccagtcgtg

SEQ ID NO: 61858 - RNA, 25 nt, Synthetic Construct
  source 1..25: mol_type = other RNA
tgtaaacatccttgactggaagctt

SEQ ID NO: 61859 - RNA, 25 nt, Synthetic Construct
  source 1..25: mol_type = other RNA
tgtaaacatccttgactggaagctt

SEQ ID NO: 61860 - RNA, 22 nt, Synthetic Construct
  source 1..22: mol_type = other RNA
atcgggaatgtcgtgtccgccc

SEQ ID NO: 61861 - RNA, 39 nt, Synthetic Construct; identical to SEQ ID NO: 773
  source 1..39: mol_type = other RNA

SEQ ID NO: 61862 - RNA, 39 nt, Synthetic Construct; identical to SEQ ID NO: 773
  source 1..39: mol_type = other RNA

SEQ ID NO: 61863 - RNA, 22 nt, Synthetic Construct
  source 1..22: mol_type = other RNA
tcgtaccgtgagtaataaagcg

SEQ ID NO: 61864 - RNA, 22 nt, Synthetic Construct
  source 1..22: mol_type = other RNA
tcgtaccgtgagtaataaagcg

SEQ ID NO: 61865 - RNA, 24 nt, Synthetic Construct
  source 1..24: mol_type = other RNA
tgaggtagtaggttgtgtggttat

SEQ ID NO: 61866 - RNA, 17 nt, Synthetic Construct
  source 1..17: mol_type = other RNA
tgccagcagccgcggta

SEQ ID NO: 61867 - RNA, 17 nt, Synthetic Construct
  source 1..17: mol_type = other RNA
tgccagcagccgcggta

SEQ ID NO: 61868 - RNA, 20 nt, Synthetic Construct
  source 1..20: mol_type = other RNA
tgaggtagtagtttgtgctg

SEQ ID NO: 61869 - RNA, 22 nt, Synthetic Construct
  source 1..22: mol_type = other RNA
tgaggcagtagtttgtgctgtt

SEQ ID NO: 61870 - RNA, 21 nt, Synthetic Construct
  source 1..21: mol_type = other RNA
agctcggtctgaggcccctca

SEQ ID NO: 61871 - RNA, 24 nt, Synthetic Construct
  source 1..24: mol_type = other RNA
atgacacgatcactcccgttgagt

SEQ ID NO: 61872 - RNA, 24 nt, Synthetic Construct
  source 1..24: mol_type = other RNA
atgacacgatcactcccgttgagt

SEQ ID NO: 61873 - RNA, 20 nt, Synthetic Construct
  source 1..20: mol_type = other RNA
tctcccaacccttgtaccag

SEQ ID NO: 61874 - RNA, 20 nt, Synthetic Construct
  source 1..20: mol_type = other RNA
tctcccaacccttgtaccag

SEQ ID NO: 61875 - RNA, 22 nt, Synthetic Construct
  source 1..22: mol_type = other RNA
ggcagcattgtacagggctatg

SEQ ID NO: 61876 - RNA, 22 nt, Synthetic Construct
  source 1..22: mol_type = other RNA
ggcagcattgtacagggctatg

SEQ ID NO: 61877 - RNA, 18 nt, Synthetic Construct
  source 1..18: mol_type = other RNA
atggccgggacagagggc

SEQ ID NO: 61878 - RNA, 21 nt, Synthetic Construct
  source 1..21: mol_type = other RNA
acctgtactgagctgccccga

SEQ ID NO: 61879 - RNA, 21 nt, Synthetic Construct
  source 1..21: mol_type = other RNA
acctgtactgagctgccccga

SEQ ID NO: 61880 - RNA, 25 nt, Synthetic Construct
  source 1..25: mol_type = other RNA
agctcggtctgaggcccctcagttt

SEQ ID NO: 61881 - RNA, 25 nt, Synthetic Construct
  source 1..25: mol_type = other RNA
agctcggtctgaggcccctcagttt

SEQ ID NO: 61882 - RNA, 29 nt, Synthetic Construct
  source 1..29: mol_type = other RNA
ttacaggggttcgaatcccctaggggacg

SEQ ID NO: 61883 - RNA, 20 nt, Synthetic Construct
  source 1..20: mol_type = other RNA
tgaggtagaaggttgtatag

SEQ ID NO: 61884 - RNA, 25 nt, Synthetic Construct
  source 1..25: mol_type = other RNA
ttgaggatatgagatcgagacgacg

SEQ ID NO: 61885 - RNA, 25 nt, Synthetic Construct
  source 1..25: mol_type = other RNA
ttgaggatatgagatcgagacgacg

SEQ ID NO: 61886 - RNA, 24 nt, Synthetic Construct
  source 1..24: mol_type = other RNA
tgaggtagtaggttgtgtggtttt

SEQ ID NO: 61887 - RNA, 23 nt, Synthetic Construct
  source 1..23: mol_type = other RNA
taactccttaagcgaatctcggc

SEQ ID NO: 61888 - RNA, 23 nt, Synthetic Construct
  source 1..23: mol_type = other RNA
taactccttaagcgaatctcggc

SEQ ID NO: 61889 - RNA, 22 nt, Synthetic Construct
  source 1..22: mol_type = other RNA
tattgcacttgtcccgacctgt

SEQ ID NO: 61890 - RNA, 26 nt, Synthetic Construct
  source 1..26: mol_type = other RNA
atttccccttggggttgtaggaccac

SEQ ID NO: 61891 - RNA, 26 nt, Synthetic Construct
  source 1..26: mol_type = other RNA
atttccccttggggttgtaggaccac

SEQ ID NO: 61892 - RNA, 21 nt, Synthetic Construct
  source 1..21: mol_type = other RNA
tgaggtagtagattgtgtagt

SEQ ID NO: 61893 - RNA, 31 nt, Synthetic Construct; identical to SEQ ID NO: 18991
  source 1..31: mol_type = other RNA

SEQ ID NO: 61894 - RNA, 31 nt, Synthetic Construct; identical to SEQ ID NO: 18991
  source 1..31: mol_type = other RNA

SEQ ID NO: 61895 - RNA, 22 nt, Synthetic Construct
  source 1..22: mol_type = other RNA
tgaggtagtagtttgtgttgtt

SEQ ID NO: 61896 - RNA, 22 nt, Synthetic Construct
  source 1..22: mol_type = other RNA
tgaggtagtagtttgtgttgtt

SEQ ID NO: 61897 - RNA, 22 nt, Synthetic Construct
  source 1..22: mol_type = other RNA
tcttgtactgagctgccccgag

SEQ ID NO: 61898 - RNA, 22 nt, Synthetic Construct
  source 1..22: mol_type = other RNA
tcttgtactgagctgccccgag

SEQ ID NO: 61899 - RNA, 23 nt, Synthetic Construct
  source 1..23: mol_type = other RNA
taatactgccgggtaatgatgga

SEQ ID NO: 61900 - RNA, 22 nt, Synthetic Construct
  source 1..22: mol_type = other RNA
tgaggtagtagcttgtgctgtt

SEQ ID NO: 61901 - RNA, 24 nt, Synthetic Construct
  source 1..24: mol_type = other RNA
aggaagccctggaggggctggagg

SEQ ID NO: 61902 - RNA, 24 nt, Synthetic Construct
  source 1..24: mol_type = other RNA
aggaagccctggaggggctggagg

SEQ ID NO: 61903 - RNA, 21 nt, Synthetic Construct
  source 1..21: mol_type = other RNA
cgaggtagtaggttgtatagt

SEQ ID NO: 61904 - RNA, 21 nt, Synthetic Construct
  source 1..21: mol_type = other RNA
cgaggtagtaggttgtatagt

SEQ ID NO: 61905 - RNA, 22 nt, Synthetic Construct
  source 1..22: mol_type = other RNA
tgaggtaatagtttgtgctgtt

SEQ ID NO: 61906 - RNA, 21 nt, Synthetic Construct
  source 1..21: mol_type = other RNA
cgtaccgtgagtaataatgca

SEQ ID NO: 61907 - RNA, 22 nt, Synthetic Construct
  source 1..22: mol_type = other RNA
tgaggtagtagtttgtgctggt

SEQ ID NO: 61908 - RNA, 21 nt, Synthetic Construct
  source 1..21: mol_type = other RNA
tcgtaccgtgagtaataatga

SEQ ID NO: 61909 - RNA, 23 nt, Synthetic Construct
  source 1..23: mol_type = other RNA
ttaatgctaatcgtgataggggt

SEQ ID NO: 61910 - RNA, 22 nt, Synthetic Construct
  source 1..22: mol_type = other RNA
tgaggtagtagattgtataatt

SEQ ID NO: 61911 - RNA, 22 nt, Synthetic Construct
  source 1..22: mol_type = other RNA
tgaggtagtagattgtataatt

SEQ ID NO: 61912 - RNA, 23 nt, Synthetic Construct
  source 1..23: mol_type = other RNA
caaagtgctcatagtgcaggtag

SEQ ID NO: 61913 - RNA, 23 nt, Synthetic Construct
  source 1..23: mol_type = other RNA
tcctgtactgggctgccccgagt

SEQ ID NO: 61914 - RNA, 22 nt, Synthetic Construct
  source 1..22: mol_type = other RNA
cataaagtagaaagcactacta

SEQ ID NO: 61915 - RNA, 21 nt, Synthetic Construct
  source 1..21: mol_type = other RNA
tgaggtagtaggttgtataga

SEQ ID NO: 61916 - RNA, 32 nt, Synthetic Construct; identical to SEQ ID NO: 3541
  source 1..32: mol_type = other RNA

SEQ ID NO: 61917 - RNA, 22 nt, Synthetic Construct
  source 1..22: mol_type = other RNA
tgaggtagtaggttgaatagtt

SEQ ID NO: 61918 - RNA, 22 nt, Synthetic Construct
  source 1..22: mol_type = other RNA
tgaggtagtaggttgaatagtt

SEQ ID NO: 61919 - RNA, 21 nt, Synthetic Construct
  source 1..21: mol_type = other RNA
tcctgtactgagctgccccgg

SEQ ID NO: 61920 - RNA, 21 nt, Synthetic Construct
  source 1..21: mol_type = other RNA
tcctgtactgagctgccccgg

SEQ ID NO: 61921 - RNA, 22 nt, Synthetic Construct
  source 1..22: mol_type = other RNA
attgcacttgtcccggcctgtt

SEQ ID NO: 61922 - RNA, 22 nt, Synthetic Construct
  source 1..22: mol_type = other RNA
attgcacttgtcccggcctgtt

SEQ ID NO: 61923 - RNA, 32 nt, Synthetic Construct; identical to SEQ ID NO: 3748
  source 1..32: mol_type = other RNA

SEQ ID NO: 61924 - RNA, 32 nt, Synthetic Construct; identical to SEQ ID NO: 3748
  source 1..32: mol_type = other RNA

SEQ ID NO: 61925 - RNA, 24 nt, Synthetic Construct
  source 1..24: mol_type = other RNA
gtcagtttgtcaaataccccaatt

SEQ ID NO: 61926 - RNA, 24 nt, Synthetic Construct
  source 1..24: mol_type = other RNA
gtcagtttgtcaaataccccaatt

SEQ ID NO: 61927 - RNA, 17 nt, Synthetic Construct
  source 1..17: mol_type = other RNA
caggacggtggccatgg

SEQ ID NO: 61928 - RNA, 17 nt, Synthetic Construct
  source 1..17: mol_type = other RNA
caggacggtggccatgg

SEQ ID NO: 61929 - RNA, 18 nt, Synthetic Construct
  source 1..18: mol_type = other RNA
tgaggtagtagattgtat

SEQ ID NO: 61930 - RNA, 27 nt, Synthetic Construct
  source 1..27: mol_type = other RNA
ccccccgctgctaaatttgactggctt

SEQ ID NO: 61931 - RNA, 27 nt, Synthetic Construct
  source 1..27: mol_type = other RNA
ccccccgctgctaaatttgactggctt

SEQ ID NO: 61932 - RNA, 17 nt, Synthetic Construct
  source 1..17: mol_type = other RNA
gtccggatcgtagtctg

SEQ ID NO: 61933 - RNA, 17 nt, Synthetic Construct
  source 1..17: mol_type = other RNA
ctaatgagactgccggt

SEQ ID NO: 61934 - RNA, 17 nt, Synthetic Construct
  source 1..17: mol_type = other RNA
ctaatgagactgccggt

SEQ ID NO: 61935 - RNA, 16 nt, Synthetic Construct
  source 1..16: mol_type = other RNA
gtctacggctatacca

SEQ ID NO: 61936 - RNA, 25 nt, Synthetic Construct
  source 1..25: mol_type = other RNA
gctcagtggaaaggatgtgaatcta

SEQ ID NO: 61937 - RNA, 25 nt, Synthetic Construct
  source 1..25: mol_type = other RNA
gctcagtggaaaggatgtgaatcta

SEQ ID NO: 61938 - RNA, 42 nt, Synthetic Construct; identical to SEQ ID NO: 19836
  source 1..42: mol_type = other RNA

SEQ ID NO: 61939 - RNA, 25 nt, Synthetic Construct
  source 1..25: mol_type = other RNA
cgaatgttgctcggtgaaccccttt

SEQ ID NO: 61940 - RNA, 25 nt, Synthetic Construct
  source 1..25: mol_type = other RNA
cgaatgttgctcggtgaaccccttt

SEQ ID NO: 61941 - RNA, 18 nt, Synthetic Construct
  source 1..18: mol_type = other RNA
gtaggtcatcgtcaggct

SEQ ID NO: 61942 - RNA, 22 nt, Synthetic Construct
  source 1..22: mol_type = other RNA
tgaggtagtaatttgtgctgtt

SEQ ID NO: 61943 - RNA, 23 nt, Synthetic Construct
  source 1..23: mol_type = other RNA
caaagtgctgttcgtgcaggcag

SEQ ID NO: 61944 - RNA, 23 nt, Synthetic Construct
  source 1..23: mol_type = other RNA
caaagtgctgttcgtgcaggcag

SEQ ID NO: 61945 - RNA, 22 nt, Synthetic Construct
  source 1..22: mol_type = other RNA
tgaggtggtagtttgtgctgtt

SEQ ID NO: 61946 - RNA, 31 nt, Synthetic Construct; identical to SEQ ID NO: 7160
  source 1..31: mol_type = other RNA

SEQ ID NO: 61947 - RNA, 20 nt, Synthetic Construct
  source 1..20: mol_type = other RNA
ggtcccaagggtatggctgt

SEQ ID NO: 61948 - RNA, 22 nt, Synthetic Construct
  source 1..22: mol_type = other RNA
tgtgactggttgaccagagggg

SEQ ID NO: 61949 - RNA, 23 nt, Synthetic Construct
  source 1..23: mol_type = other RNA
tgagaactgaattccatgggtta

SEQ ID NO: 61950 - RNA, 20 nt, Synthetic Construct
  source 1..20: mol_type = other RNA
tagcgaaattccttgtcggg

SEQ ID NO: 61951 - RNA, 20 nt, Synthetic Construct
  source 1..20: mol_type = other RNA
tagcgaaattccttgtcggg

SEQ ID NO: 61952 - RNA, 21 nt, Synthetic Construct
  source 1..21: mol_type = other RNA
gcctgctggggtggaacctgg

SEQ ID NO: 61953 - RNA, 22 nt, Synthetic Construct
  source 1..22: mol_type = other RNA
tagcagcacataatggtttgtg

SEQ ID NO: 61954 - RNA, 24 nt, Synthetic Construct
  source 1..24: mol_type = other RNA
tgtgaacatccccgactggaagct

SEQ ID NO: 61955 - RNA, 22 nt, Synthetic Construct
  source 1..22: mol_type = other RNA
tgaggtagtagtttgtgctgtt

SEQ ID NO: 61956 - RNA, 22 nt, Synthetic Construct
  source 1..22: mol_type = other RNA
tgaggtagtagtttgtgctgtt

SEQ ID NO: 61957 - RNA, 15 nt, Synthetic Construct
  source 1..15: mol_type = other RNA
cagtgaaacgagtca

SEQ ID NO: 61958 - RNA, 15 nt, Synthetic Construct
  source 1..15: mol_type = other RNA
cagtgaaacgagtca

SEQ ID NO: 61959 - RNA, 21 nt, Synthetic Construct
  source 1..21: mol_type = other RNA
tggagtgtgacaatggtgttt

SEQ ID NO: 61960 - RNA, 23 nt, Synthetic Construct
  source 1..23: mol_type = other RNA
ttcaagtaattcaggataggttg

SEQ ID NO: 61961 - RNA, 23 nt, Synthetic Construct
  source 1..23: mol_type = other RNA
ttcaagtaattcaggataggttg

SEQ ID NO: 61962 - RNA, 22 nt, Synthetic Construct
  source 1..22: mol_type = other RNA
tgaggtagtagttagtgctgtt

SEQ ID NO: 61963 - RNA, 22 nt, Synthetic Construct
  source 1..22: mol_type = other RNA
tgaggtagtagttagtgctgtt

SEQ ID NO: 61964 - RNA, 21 nt, Synthetic Construct
  source 1..21: mol_type = other RNA
gggagtgtgacaatggtgttt

SEQ ID NO: 61965 - RNA, 32 nt, Synthetic Construct; identical to SEQ ID NO: 2850
  source 1..32: mol_type = other RNA

SEQ ID NO: 61966 - RNA, 21 nt, Synthetic Construct
  source 1..21: mol_type = other RNA
tgagatagtaggttgtgtggt

SEQ ID NO: 61967 - RNA, 26 nt, Synthetic Construct
  source 1..26: mol_type = other RNA
gcgggcgtagctcaggggtagagcgc

SEQ ID NO: 61968 - RNA, 26 nt, Synthetic Construct
  source 1..26: mol_type = other RNA
gcgggcgtagctcaggggtagagcgc

SEQ ID NO: 61969 - RNA, 27 nt, Synthetic Construct
  source 1..27: mol_type = other RNA
cctcccactgctaaatttgactggctt

SEQ ID NO: 61970 - RNA, 22 nt, Synthetic Construct
  source 1..22: mol_type = other RNA
atcacattgccagggatttcca

SEQ ID NO: 61971 - RNA, 18 nt, Synthetic Construct
  source 1..18: mol_type = other RNA
gttaaaaagctcgtagtt

SEQ ID NO: 61972 - RNA, 18 nt, Synthetic Construct
  source 1..18: mol_type = other RNA
gttaaaaagctcgtagtt

SEQ ID NO: 61973 - RNA, 23 nt, Synthetic Construct
  source 1..23: mol_type = other RNA
agaggtagtaggttgtgtggttt

SEQ ID NO: 61974 - RNA, 23 nt, Synthetic Construct
  source 1..23: mol_type = other RNA
agaggtagtaggttgtgtggttt

SEQ ID NO: 61975 - RNA, 21 nt, Synthetic Construct
  source 1..21: mol_type = other RNA
tggggtgtgacaatggtgttt

SEQ ID NO: 61976 - RNA, 21 nt, Synthetic Construct
  source 1..21: mol_type = other RNA
tggggtgtgacaatggtgttt

SEQ ID NO: 61977 - RNA, 26 nt, Synthetic Construct
  source 1..26: mol_type = other RNA
tcccactgcttcacttgactagccta

SEQ ID NO: 61978 - RNA, 20 nt, Synthetic Construct
  source 1..20: mol_type = other RNA
tgaggtagtaggttgtgtga

SEQ ID NO: 61979 - RNA, 20 nt, Synthetic Construct
  source 1..20: mol_type = other RNA
tgaggtagtaggttgtgtga

SEQ ID NO: 61980 - RNA, 21 nt, Synthetic Construct
  source 1..21: mol_type = other RNA
tgaggtagtggattgtatagt

SEQ ID NO: 61981 - RNA, 21 nt, Synthetic Construct
  source 1..21: mol_type = other RNA
tgaggtagtggattgtatagt

SEQ ID NO: 61982 - RNA, 23 nt, Synthetic Construct
  source 1..23: mol_type = other RNA
caaagtgcagttcgtgcaggtag

SEQ ID NO: 61983 - RNA, 23 nt, Synthetic Construct
  source 1..23: mol_type = other RNA
ggcggttatgcaagacagaggtg

SEQ ID NO: 61984 - RNA, 23 nt, Synthetic Construct
  source 1..23: mol_type = other RNA
ggcggttatgcaagacagaggtg

SEQ ID NO: 61985 - RNA, 22 nt, Synthetic Construct
  source 1..22: mol_type = other RNA
tattgcactcgtcccggcctgt

SEQ ID NO: 61986 - RNA, 20 nt, Synthetic Construct
  source 1..20: mol_type = other RNA
tggagtgtgacaatggtgtt

SEQ ID NO: 61987 - RNA, 21 nt, Synthetic Construct
  source 1..21: mol_type = other RNA
tgaggaagtagattgtatagt

SEQ ID NO: 61988 - RNA, 21 nt, Synthetic Construct
  source 1..21: mol_type = other RNA
tgaggaagtagattgtatagt

SEQ ID NO: 61989 - RNA, 22 nt, Synthetic Construct
  source 1..22: mol_type = other RNA
tcccactgcttcacttgactag

SEQ ID NO: 61990 - RNA, 22 nt, Synthetic Construct
  source 1..22: mol_type = other RNA
tcccactgcttcacttgactag

SEQ ID NO: 61991 - RNA, 22 nt, Synthetic Construct
  source 1..22: mol_type = other RNA
ttcaagtaatccaggataggcc

SEQ ID NO: 61992 - RNA, 23 nt, Synthetic Construct
  source 1..23: mol_type = other RNA
tgaagggcagagagcgagacttt

SEQ ID NO: 61993 - RNA, 22 nt, Synthetic Construct
  source 1..22: mol_type = other RNA
tcctgtactgagctgccccgtg

SEQ ID NO: 61994 - RNA, 22 nt, Synthetic Construct
  source 1..22: mol_type = other RNA
tcctgtactgggctgccccgag

SEQ ID NO: 61995 - RNA, 22 nt, Synthetic Construct
  source 1..22: mol_type = other RNA
tcctgtactgggctgccccgag

SEQ ID NO: 61996 - RNA, 22 nt, Synthetic Construct
  source 1..22: mol_type = other RNA
tcagtgcatcacagaactttgt

SEQ ID NO: 61997 - RNA, 19 nt, Synthetic Construct
  source 1..19: mol_type = other RNA
cagagttctacagtccgac

SEQ ID NO: 61998 - RNA, 19 nt, Synthetic Construct
  source 1..19: mol_type = other RNA
cagagttctacagtccgac

SEQ ID NO: 61999 - RNA, 22 nt, Synthetic Construct
  source 1..22: mol_type = other RNA
tgtagtgtttcctactatatgg

SEQ ID NO: 62000 - RNA, 22 nt, Synthetic Construct
  source 1..22: mol_type = other RNA
tgaggtagtagtttgtgctgat

SEQ ID NO: 62001 - RNA, 22 nt, Synthetic Construct
  source 1..22: mol_type = other RNA
tcgtgccgtgagtaataatgcg

SEQ ID NO: 62002 - RNA, 21 nt, Synthetic Construct
  source 1..21: mol_type = other RNA
aagttgttcgtggtggattcg

SEQ ID NO: 62003 - RNA, 21 nt, Synthetic Construct
  source 1..21: mol_type = other RNA
aagttgttcgtggtggattcg

SEQ ID NO: 62004 - RNA, 18 nt, Synthetic Construct
  source 1..18: mol_type = other RNA
ttcaagtaatccaggata

SEQ ID NO: 62005 - RNA, 18 nt, Synthetic Construct
  source 1..18: mol_type = other RNA
ttcaagtaatccaggata

SEQ ID NO: 62006 - RNA, 21 nt, Synthetic Construct
  source 1..21: mol_type = other RNA
cataattacttttggtacgcg

SEQ ID NO: 62007 - RNA, 22 nt, Synthetic Construct
  source 1..22: mol_type = other RNA
acagtagtctgcacattggttg

SEQ ID NO: 62008 - RNA, 23 nt, Synthetic Construct
  source 1..23: mol_type = other RNA
cggtaatacgacgtacttagtgt

SEQ ID NO: 62009 - RNA, 30 nt, Synthetic Construct; identical to SEQ ID NO: 2407
  source 1..30: mol_type = other RNA

SEQ ID NO: 62010 - RNA, 21 nt, Synthetic Construct
  source 1..21: mol_type = other RNA
tgtgactggttgaccagaggg

SEQ ID NO: 62011 - RNA, 20 nt, Synthetic Construct
  source 1..20: mol_type = other RNA
taaggtagtaggttgtgtgg

SEQ ID NO: 62012 - RNA, 20 nt, Synthetic Construct
  source 1..20: mol_type = other RNA
taaggtagtaggttgtgtgg

SEQ ID NO: 62013 - RNA, 22 nt, Synthetic Construct
  source 1..22: mol_type = other RNA
tagcagcgcgtaaatattggcg

SEQ ID NO: 62014 - RNA, 22 nt, Synthetic Construct
  source 1..22: mol_type = other RNA
ccacctcccctgcaaacgtcca

SEQ ID NO: 62015 - RNA, 22 nt, Synthetic Construct
  source 1..22: mol_type = other RNA
ccacctcccctgcaaacgtcca

SEQ ID NO: 62016 - RNA, 23 nt, Synthetic Construct
  source 1..23: mol_type = other RNA
agaagcattgtacagggctatga

SEQ ID NO: 62017 - RNA, 27 nt, Synthetic Construct
  source 1..27: mol_type = other RNA
ccccccactgctaaattcgactggctt

SEQ ID NO: 62018 - RNA, 19 nt, Synthetic Construct
  source 1..19: mol_type = other RNA
tgaggtagtaggttgtata

SEQ ID NO: 62019 - RNA, 22 nt, Synthetic Construct
  source 1..22: mol_type = other RNA
taccagcacgtaaatattggcg

SEQ ID NO: 62020 - RNA, 22 nt, Synthetic Construct
  source 1..22: mol_type = other RNA
tacgcctgtctgagcgtcgctt

SEQ ID NO: 62021 - RNA, 15 nt, Synthetic Construct
  source 1..15: mol_type = other RNA
ggtcatcgtcaggct

SEQ ID NO: 62022 - RNA, 16 nt, Synthetic Construct
  source 1..16: mol_type = other RNA
acggcgggagtaacta

SEQ ID NO: 62023 - RNA, 16 nt, Synthetic Construct
  source 1..16: mol_type = other RNA
acggcgggagtaacta

SEQ ID NO: 62024 - RNA, 23 nt, Synthetic Construct
  source 1..23: mol_type = other RNA
tggtaatacgacgtactcagtgt

SEQ ID NO: 62025 - RNA, 23 nt, Synthetic Construct
  source 1..23: mol_type = other RNA
tggtaatacgacgtactcagtgt

SEQ ID NO: 62026 - RNA, 23 nt, Synthetic Construct
  source 1..23: mol_type = other RNA
aaaccgttaccattactgagttt

SEQ ID NO: 62027 - RNA, 23 nt, Synthetic Construct
  source 1..23: mol_type = other RNA
aaaccgttaccattactgagttt

SEQ ID NO: 62028 - RNA, 19 nt, Synthetic Construct
  source 1..19: mol_type = other RNA
catggccgttcttagttgg

SEQ ID NO: 62029 - RNA, 21 nt, Synthetic Construct
  source 1..21: mol_type = other RNA
tgaggtagtaagttgtgtggt

SEQ ID NO: 62030 - RNA, 22 nt, Synthetic Construct
  source 1..22: mol_type = other RNA
gagaactgaattccatgggttg

SEQ ID NO: 62031 - RNA, 22 nt, Synthetic Construct
  source 1..22: mol_type = other RNA
gagaactgaattccatgggttg

SEQ ID NO: 62032 - RNA, 21 nt, Synthetic Construct
  source 1..21: mol_type = other RNA
cctctgggcccttcctccagt

SEQ ID NO: 62033 - RNA, 22 nt, Synthetic Construct
  source 1..22: mol_type = other RNA
tgaggtagtaggttgtgttgtt

SEQ ID NO: 62034 - RNA, 23 nt, Synthetic Construct
  source 1..23: mol_type = other RNA
agctcggtctgaggcccctcaga

SEQ ID NO: 62035 - RNA, 23 nt, Synthetic Construct
  source 1..23: mol_type = other RNA
agctcggtctgaggcccctcaga

SEQ ID NO: 62036 - RNA, 23 nt, Synthetic Construct
  source 1..23: mol_type = other RNA
cgctcacggaaagagaatgaagc

SEQ ID NO: 62037 - RNA, 23 nt, Synthetic Construct
  source 1..23: mol_type = other RNA
cgctcacggaaagagaatgaagc

SEQ ID NO: 62038 - RNA, 23 nt, Synthetic Construct
  source 1..23: mol_type = other RNA
tgagaactgaattccatgggttt

SEQ ID NO: 62039 - RNA, 22 nt, Synthetic Construct
  source 1..22: mol_type = other RNA
tgaggtagtagtttgtgatgtt

SEQ ID NO: 62040 - RNA, 22 nt, Synthetic Construct
  source 1..22: mol_type = other RNA
tgaggtagtagtttgtgatgtt

SEQ ID NO: 62041 - RNA, 20 nt, Synthetic Construct
  source 1..20: mol_type = other RNA
agaggtagtaggttgtgtgg

SEQ ID NO: 62042 - RNA, 23 nt, Synthetic Construct
  source 1..23: mol_type = other RNA
tgaggtagtaggttgtgtggtat

SEQ ID NO: 62043 - RNA, 25 nt, Synthetic Construct
  source 1..25: mol_type = other RNA
aatgacacgatcactcccgttgagt

SEQ ID NO: 62044 - RNA, 22 nt, Synthetic Construct
  source 1..22: mol_type = other RNA
tagccgcacgtaaatattggcg

SEQ ID NO: 62045 - RNA, 22 nt, Synthetic Construct
  source 1..22: mol_type = other RNA
tagccgcacgtaaatattggcg

SEQ ID NO: 62046 - RNA, 15 nt, Synthetic Construct
  source 1..15: mol_type = other RNA
accctgttgagcttg

SEQ ID NO: 62047 - RNA, 22 nt, Synthetic Construct
  source 1..22: mol_type = other RNA
tgaggtagtaagttgtatagtt

SEQ ID NO: 62048 - RNA, 22 nt, Synthetic Construct
  source 1..22: mol_type = other RNA
tgaggtagtaagttgtatagtt

SEQ ID NO: 62049 - RNA, 15 nt, Synthetic Construct
  source 1..15: mol_type = other RNA
ggagagatggctgag

SEQ ID NO: 62050 - RNA, 15 nt, Synthetic Construct
  source 1..15: mol_type = other RNA
ggagagatggctgag

SEQ ID NO: 62051 - RNA, 24 nt, Synthetic Construct
  source 1..24: mol_type = other RNA
agctacatctggctactgggtctc

SEQ ID NO: 62052 - RNA, 24 nt, Synthetic Construct
  source 1..24: mol_type = other RNA
agctacatctggctactgggtctc

SEQ ID NO: 62053 - RNA, 22 nt, Synthetic Construct
  source 1..22: mol_type = other RNA
agctacattgtctgctgggttt

SEQ ID NO: 62054 - RNA, 22 nt, Synthetic Construct
  source 1..22: mol_type = other RNA
tgaggtaatagtttgtgctgtt

SEQ ID NO: 62055 - RNA, 22 nt, Synthetic Construct
  source 1..22: mol_type = other RNA
tgtgcaaatccatgcaaaactg

SEQ ID NO: 62056 - RNA, 23 nt, Synthetic Construct
  source 1..23: mol_type = other RNA
tgtcagtttgtcaaatacaccaa

SEQ ID NO: 62057 - RNA, 23 nt, Synthetic Construct
  source 1..23: mol_type = other RNA
tgtcagtttgtcaaatacaccaa

SEQ ID NO: 62058 - RNA, 19 nt, Synthetic Construct
  source 1..19: mol_type = other RNA
aggacagtgaaacgagtca

SEQ ID NO: 62059 - RNA, 27 nt, Synthetic Construct
  source 1..27: mol_type = other RNA
ccccccactgctaaatttgactgactt

SEQ ID NO: 62060 - RNA, 41 nt, Synthetic Construct; identical to SEQ ID NO: 491
  source 1..41: mol_type = other RNA

SEQ ID NO: 62061 - RNA, 27 nt, Synthetic Construct
  source 1..27: mol_type = other RNA
ccccccattgctaaatttgactggctt

SEQ ID NO: 62062 - RNA, 21 nt, Synthetic Construct
  source 1..21: mol_type = other RNA
tgtgactggttgaccagaggg

SEQ ID NO: 62063 - RNA, 21 nt, Synthetic Construct
  source 1..21: mol_type = other RNA
tgtgactggttgaccagaggg

SEQ ID NO: 62064 - RNA, 19 nt, Synthetic Construct
  source 1..19: mol_type = other RNA
tggccgtcgtcagctcgtg

SEQ ID NO: 62065 - RNA, 22 nt, Synthetic Construct
  source 1..22: mol_type = other RNA
cgaggtagtagattgtatagtt

SEQ ID NO: 62066 - RNA, 24 nt, Synthetic Construct
  source 1..24: mol_type = other RNA
aagctcggtctgaggcccctcagt

SEQ ID NO: 62067 - RNA, 24 nt, Synthetic Construct
  source 1..24: mol_type = other RNA
aagctcggtctgaggcccctcagt

SEQ ID NO: 62068 - RNA, 22 nt, Synthetic Construct
  source 1..22: mol_type = other RNA
tgaggtagtaatttgtgctgtt

SEQ ID NO: 62069 - RNA, 16 nt, Synthetic Construct
  source 1..16: mol_type = other RNA
atctacggccatacca

SEQ ID NO: 62070 - RNA, 31 nt, Synthetic Construct; identical to SEQ ID NO: 6001
  source 1..31: mol_type = other RNA

SEQ ID NO: 62071 - RNA, 31 nt, Synthetic Construct; identical to SEQ ID NO: 6001
  source 1..31: mol_type = other RNA

SEQ ID NO: 62072 - RNA, 17 nt, Synthetic Construct
  source 1..17: mol_type = other RNA
atgcaagtcgaacggta

SEQ ID NO: 62073 - RNA, 17 nt, Synthetic Construct
  source 1..17: mol_type = other RNA
atgcaagtcgaacggta

SEQ ID NO: 62074 - RNA, 26 nt, Synthetic Construct
  source 1..26: mol_type = other RNA
tgtccccgcgaggggcccggggcggg

SEQ ID NO: 62075 - RNA, 22 nt, Synthetic Construct
  source 1..22: mol_type = other RNA
tgaggtagtaggttgtggggtt

SEQ ID NO: 62076 - RNA, 26 nt, Synthetic Construct
  source 1..26: mol_type = other RNA
gagcagctaataccgcatacgacctg

SEQ ID NO: 62077 - RNA, 22 nt, Synthetic Construct
  source 1..22: mol_type = other RNA
tagcagcaagtaaatattggcg

SEQ ID NO: 62078 - RNA, 22 nt, Synthetic Construct
  source 1..22: mol_type = other RNA
tagcagcaagtaaatattggcg

SEQ ID NO: 62079 - RNA, 15 nt, Synthetic Construct
  source 1..15: mol_type = other RNA
gctatgggatttgtt

SEQ ID NO: 62080 - RNA, 15 nt, Synthetic Construct
  source 1..15: mol_type = other RNA
gctatgggatttgtt

SEQ ID NO: 62081 - RNA, 22 nt, Synthetic Construct
  source 1..22: mol_type = other RNA
tctgcccagtgctctgaatgtc

SEQ ID NO: 62082 - RNA, 22 nt, Synthetic Construct
  source 1..22: mol_type = other RNA
tctgcccagtgctctgaatgtc

SEQ ID NO: 62083 - RNA, 23 nt, Synthetic Construct
  source 1..23: mol_type = other RNA
atgacacgatcactcccgttgag

SEQ ID NO: 62084 - RNA, 15 nt, Synthetic Construct
  source 1..15: mol_type = other RNA
ccagaaacccggtcg

SEQ ID NO: 62085 - RNA, 35 nt, Synthetic Construct; identical to SEQ ID NO: 2452
  source 1..35: mol_type = other RNA

SEQ ID NO: 62086 - RNA, 33 nt, Synthetic Construct; identical to SEQ ID NO: 2266
  source 1..33: mol_type = other RNA

SEQ ID NO: 62087 - RNA, 23 nt, Synthetic Construct
  source 1..23: mol_type = other RNA
taactccttaagcgaatctcggc

SEQ ID NO: 62088 - RNA, 23 nt, Synthetic Construct
  source 1..23: mol_type = other RNA
taactccttaagcgaatctcggc

SEQ ID NO: 62089 - RNA, 27 nt, Synthetic Construct
  source 1..27: mol_type = other RNA
ccccccactgcaaaatttgactggctt

SEQ ID NO: 62090 - RNA, 22 nt, Synthetic Construct
  source 1..22: mol_type = other RNA
tgaggtagtagattgtacagtt

SEQ ID NO: 62091 - RNA, 22 nt, Synthetic Construct
  source 1..22: mol_type = other RNA
tgaggtagtagattgtacagtt

SEQ ID NO: 62092 - RNA, 24 nt, Synthetic Construct
  source 1..24: mol_type = other RNA
tgaggtagtaggttgtgtggtttc

SEQ ID NO: 62093 - RNA, 24 nt, Synthetic Construct
  source 1..24: mol_type = other RNA
tgaggtagtaggttgtgtggtttc

SEQ ID NO: 62094 - RNA, 34 nt, Synthetic Construct; identical to SEQ ID NO: 385
  source 1..34: mol_type = other RNA

SEQ ID NO: 62095 - RNA, 34 nt, Synthetic Construct; identical to SEQ ID NO: 385
  source 1..34: mol_type = other RNA

SEQ ID NO: 62096 - RNA, 18 nt, Synthetic Construct
  source 1..18: mol_type = other RNA
aaccgggcggaaacacca

SEQ ID NO: 62097 - RNA, 20 nt, Synthetic Construct
  source 1..20: mol_type = other RNA
ttcacagtggctaagttctg

SEQ ID NO: 62098 - RNA, 17 nt, Synthetic Construct
  source 1..17: mol_type = other RNA
ttggagggcaagtctgg

SEQ ID NO: 62099 - RNA, 17 nt, Synthetic Construct
  source 1..17: mol_type = other RNA
ttggagggcaagtctgg

SEQ ID NO: 62100 - RNA, 21 nt, Synthetic Construct
  source 1..21: mol_type = other RNA
agcaggacggtggccatggaa

SEQ ID NO: 62101 - RNA, 21 nt, Synthetic Construct
  source 1..21: mol_type = other RNA
agcaggacggtggccatggaa

SEQ ID NO: 62102 - RNA, 15 nt, Synthetic Construct
  source 1..15: mol_type = other RNA
gagctgtggataggg

SEQ ID NO: 62103 - RNA, 22 nt, Synthetic Construct
  source 1..22: mol_type = other RNA
tgaggtagtagtttgtgcggtt

SEQ ID NO: 62104 - RNA, 22 nt, Synthetic Construct
  source 1..22: mol_type = other RNA
tgaggtagtagtttgtgcggtt

SEQ ID NO: 62105 - RNA, 22 nt, Synthetic Construct
  source 1..22: mol_type = other RNA
tggaatgtaaagaagtacgtat

SEQ ID NO: 62106 - RNA, 21 nt, Synthetic Construct
  source 1..21: mol_type = other RNA
tggcagtgtcttagctggttg

SEQ ID NO: 62107 - RNA, 21 nt, Synthetic Construct
  source 1..21: mol_type = other RNA
tgaggtagtaggttgtgtggc

SEQ ID NO: 62108 - RNA, 20 nt, Synthetic Construct
  source 1..20: mol_type = other RNA
agctacattgtctgctgggt

SEQ ID NO: 62109 - RNA, 21 nt, Synthetic Construct
  source 1..21: mol_type = other RNA
cgtaccgtgagtaataatgag

SEQ ID NO: 62110 - RNA, 22 nt, Synthetic Construct
  source 1..22: mol_type = other RNA
tcgtaccgtgagtgataatgcg

SEQ ID NO: 62111 - RNA, 22 nt, Synthetic Construct
  source 1..22: mol_type = other RNA
tcgtaccgtgagtgataatgcg

SEQ ID NO: 62112 - RNA, 25 nt, Synthetic Construct
  source 1..25: mol_type = other RNA
ccccactgctaaatttgactggctt

SEQ ID NO: 62113 - RNA, 25 nt, Synthetic Construct
  source 1..25: mol_type = other RNA
ccccactgctaaatttgactggctt

SEQ ID NO: 62114 - RNA, 18 nt, Synthetic Construct
  source 1..18: mol_type = other RNA
cggcgggagtaactatga

SEQ ID NO: 62115 - RNA, 18 nt, Synthetic Construct
  source 1..18: mol_type = other RNA
gggagtatggtcgcaagg

SEQ ID NO: 62116 - RNA, 18 nt, Synthetic Construct
  source 1..18: mol_type = other RNA
gggagtatggtcgcaagg

SEQ ID NO: 62117 - RNA, 24 nt, Synthetic Construct
  source 1..24: mol_type = other RNA
acagtagtctgcacattggttatt

SEQ ID NO: 62118 - RNA, 24 nt, Synthetic Construct
  source 1..24: mol_type = other RNA
acagtagtctgcacattggttatt

SEQ ID NO: 62119 - RNA, 15 nt, Synthetic Construct
  source 1..15: mol_type = other RNA
ggaacgtgagctggg

SEQ ID NO: 62120 - RNA, 15 nt, Synthetic Construct
  source 1..15: mol_type = other RNA
ggaacgtgagctggg

SEQ ID NO: 62121 - RNA, 21 nt, Synthetic Construct
  source 1..21: mol_type = other RNA
ggctggtccgaaggtagtgag

SEQ ID NO: 62122 - RNA, 21 nt, Synthetic Construct
  source 1..21: mol_type = other RNA
ggctggtccgaaggtagtgag

SEQ ID NO: 62123 - RNA, 24 nt, Synthetic Construct
  source 1..24: mol_type = other RNA
aagctcggtctgaggcccctcagt

SEQ ID NO: 62124 - RNA, 24 nt, Synthetic Construct
  source 1..24: mol_type = other RNA
aagctcggtctgaggcccctcagt

SEQ ID NO: 62125 - RNA, 19 nt, Synthetic Construct
  source 1..19: mol_type = other RNA
tcacagtgaaccggtctct

SEQ ID NO: 62126 - RNA, 19 nt, Synthetic Construct
  source 1..19: mol_type = other RNA
tcacagtgaaccggtctct

SEQ ID NO: 62127 - RNA, 20 nt, Synthetic Construct
  source 1..20: mol_type = other RNA
tgaggtggtaggttgtgtgg

SEQ ID NO: 62128 - RNA, 19 nt, Synthetic Construct
  source 1..19: mol_type = other RNA
ccgtgttcggaagattttc

SEQ ID NO: 62129 - RNA, 22 nt, Synthetic Construct
  source 1..22: mol_type = other RNA
tattgcacttgtctcggcctgt

SEQ ID NO: 62130 - RNA, 20 nt, Synthetic Construct
  source 1..20: mol_type = other RNA
cgtaccgtgagtaataatgc

SEQ ID NO: 62131 - RNA, 20 nt, Synthetic Construct
  source 1..20: mol_type = other RNA
gcgtgcttgactgcgagact

SEQ ID NO: 62132 - RNA, 27 nt, Synthetic Construct
  source 1..27: mol_type = other RNA
ccccccactgctaaatttgactagctt

SEQ ID NO: 62133 - RNA, 27 nt, Synthetic Construct
  source 1..27: mol_type = other RNA
ccccccactgctaaatttgactagctt

SEQ ID NO: 62134 - RNA, 22 nt, Synthetic Construct
  source 1..22: mol_type = other RNA
acagtagcctgcacattggtta

SEQ ID NO: 62135 - RNA, 21 nt, Synthetic Construct
  source 1..21: mol_type = other RNA
tgcggggctagggctaacagc

SEQ ID NO: 62136 - RNA, 23 nt, Synthetic Construct
  source 1..23: mol_type = other RNA
tcctgtactgagctgccacgaga

SEQ ID NO: 62137 - RNA, 23 nt, Synthetic Construct
  source 1..23: mol_type = other RNA
tcctgtactgagctgccacgaga

SEQ ID NO: 62138 - RNA, 17 nt, Synthetic Construct
  source 1..17: mol_type = other RNA
ccagtaaacggcggccg

SEQ ID NO: 62139 - RNA, 21 nt, Synthetic Construct
  source 1..21: mol_type = other RNA
tgtcagtttgtcaaataccca

SEQ ID NO: 62140 - RNA, 17 nt, Synthetic Construct
  source 1..17: mol_type = other RNA
tggccgggacagagggc

SEQ ID NO: 62141 - RNA, 20 nt, Synthetic Construct
  source 1..20: mol_type = other RNA
gccatcatttaaagaaagcg

SEQ ID NO: 62142 - RNA, 17 nt, Synthetic Construct
  source 1..17: mol_type = other RNA
cacggcccagactccta

SEQ ID NO: 62143 - RNA, 17 nt, Synthetic Construct
  source 1..17: mol_type = other RNA
cacggcccagactccta

SEQ ID NO: 62144 - RNA, 22 nt, Synthetic Construct
  source 1..22: mol_type = other RNA
tagcagcacgtaaatattgacg

SEQ ID NO: 62145 - RNA, 23 nt, Synthetic Construct
  source 1..23: mol_type = other RNA
tgataatacgacgtacttagtgt

SEQ ID NO: 62146 - RNA, 23 nt, Synthetic Construct
  source 1..23: mol_type = other RNA
tgataatacgacgtacttagtgt

SEQ ID NO: 62147 - RNA, 22 nt, Synthetic Construct
  source 1..22: mol_type = other RNA
gagagtaggacgttgccaggtt

SEQ ID NO: 62148 - RNA, 22 nt, Synthetic Construct
  source 1..22: mol_type = other RNA
gagagtaggacgttgccaggtt

SEQ ID NO: 62149 - RNA, 23 nt, Synthetic Construct
  source 1..23: mol_type = other RNA
tggtaatacgacgtacttagcgt

SEQ ID NO: 62150 - RNA, 35 nt, Synthetic Construct; identical to SEQ ID NO: 1095
  source 1..35: mol_type = other RNA

SEQ ID NO: 62151 - RNA, 23 nt, Synthetic Construct
  source 1..23: mol_type = other RNA
aatgacacgatcactcccgttga

SEQ ID NO: 62152 - RNA, 23 nt, Synthetic Construct
  source 1..23: mol_type = other RNA
aatgacacgatcactcccgttga

SEQ ID NO: 62153 - RNA, 20 nt, Synthetic Construct
  source 1..20: mol_type = other RNA
ttggcctcaagtcaggcagg

SEQ ID NO: 62154 - RNA, 23 nt, Synthetic Construct
  source 1..23: mol_type = other RNA
tctcacacagaaatcgcacccgt

SEQ ID NO: 62155 - RNA, 23 nt, Synthetic Construct
  source 1..23: mol_type = other RNA
tctcacacagaaatcgcacccgt

SEQ ID NO: 62156 - RNA, 22 nt, Synthetic Construct
  source 1..22: mol_type = other RNA
tgaggtagtagatcgtatagtt

SEQ ID NO: 62157 - RNA, 22 nt, Synthetic Construct
  source 1..22: mol_type = other RNA
tgaggtagtagatcgtatagtt

SEQ ID NO: 62158 - RNA, 27 nt, Synthetic Construct
  source 1..27: mol_type = other RNA
ccccccaatgctaaatttgactggctt

SEQ ID NO: 62159 - RNA, 21 nt, Synthetic Construct
  source 1..21: mol_type = other RNA
tccttcattccaccggagtct

SEQ ID NO: 62160 - RNA, 19 nt, Synthetic Construct
  source 1..19: mol_type = other RNA
agcaggacggtggccatgg

SEQ ID NO: 62161 - RNA, 19 nt, Synthetic Construct
  source 1..19: mol_type = other RNA
agcaggacggtggccatgg

SEQ ID NO: 62162 - RNA, 22 nt, Synthetic Construct
  source 1..22: mol_type = other RNA
tagcagcacgtaaatattggca

SEQ ID NO: 62163 - RNA, 22 nt, Synthetic Construct
  source 1..22: mol_type = other RNA
tagcagcacgtaaatattggca

SEQ ID NO: 62164 - RNA, 22 nt, Synthetic Construct
  source 1..22: mol_type = other RNA
tgaggtagtagtttgcgctgtt

SEQ ID NO: 62165 - RNA, 27 nt, Synthetic Construct
  source 1..27: mol_type = other RNA
ctccccactgctaaatttgactggctt

SEQ ID NO: 62166 - RNA, 23 nt, Synthetic Construct
  source 1..23: mol_type = other RNA
caaagtgctgttcgtgcaagtag

SEQ ID NO: 62167 - RNA, 23 nt, Synthetic Construct
  source 1..23: mol_type = other RNA
caaagtgctgttcgtgcaagtag

SEQ ID NO: 62168 - RNA, 22 nt, Synthetic Construct
  source 1..22: mol_type = other RNA
ttcaagtaatccagggtaggct

SEQ ID NO: 62169 - RNA, 22 nt, Synthetic Construct
  source 1..22: mol_type = other RNA
ttcaagtaatccagggtaggct

SEQ ID NO: 62170 - RNA, 22 nt, Synthetic Construct
  source 1..22: mol_type = other RNA
tgaggtagtaggatgtatagtt

SEQ ID NO: 62171 - RNA, 22 nt, Synthetic Construct
  source 1..22: mol_type = other RNA
cattgcactagtctcggtctga

SEQ ID NO: 62172 - RNA, 23 nt, Synthetic Construct
  source 1..23: mol_type = other RNA
cgaggtagtaggttgtgtggttt

SEQ ID NO: 62173 - RNA, 23 nt, Synthetic Construct
  source 1..23: mol_type = other RNA
cgaggtagtaggttgtgtggttt

SEQ ID NO: 62174 - RNA, 23 nt, Synthetic Construct
  source 1..23: mol_type = other RNA
caacggaatcccaaaggcagctg

SEQ ID NO: 62175 - RNA, 20 nt, Synthetic Construct
  source 1..20: mol_type = other RNA
gggttcgattccggagaggg

SEQ ID NO: 62176 - RNA, 20 nt, Synthetic Construct
  source 1..20: mol_type = other RNA
gggttcgattccggagaggg

SEQ ID NO: 62177 - RNA, 16 nt, Synthetic Construct
  source 1..16: mol_type = other RNA
ctacagtccgacgatc

SEQ ID NO: 62178 - RNA, 16 nt, Synthetic Construct
  source 1..16: mol_type = other RNA
ctacagtccgacgatc

SEQ ID NO: 62179 - RNA, 17 nt, Synthetic Construct
  source 1..17: mol_type = other RNA
atcgtgacgatagtgca

SEQ ID NO: 62180 - RNA, 16 nt, Synthetic Construct
  source 1..16: mol_type = other RNA
cagtcaggatgttggc

SEQ ID NO: 62181 - RNA, 22 nt, Synthetic Construct
  source 1..22: mol_type = other RNA
tgaggtagtagattgtattgtt

SEQ ID NO: 62182 - RNA, 22 nt, Synthetic Construct
  source 1..22: mol_type = other RNA
tgaggtagtagattgtattgtt

SEQ ID NO: 62183 - RNA, 18 nt, Synthetic Construct
  source 1..18: mol_type = other RNA
aaccgggcggaaacacca

SEQ ID NO: 62184 - RNA, 18 nt, Synthetic Construct
  source 1..18: mol_type = other RNA
aaccgggcggaaacacca

SEQ ID NO: 62185 - RNA, 19 nt, Synthetic Construct
  source 1..19: mol_type = other RNA
atctgctggaactgcaact

SEQ ID NO: 62186 - RNA, 19 nt, Synthetic Construct
  source 1..19: mol_type = other RNA
atctgctggaactgcaact

SEQ ID NO: 62187 - RNA, 22 nt, Synthetic Construct
  source 1..22: mol_type = other RNA
tagcagcacgtaaatattgccg

SEQ ID NO: 62188 - RNA, 22 nt, Synthetic Construct
  source 1..22: mol_type = other RNA
tagcagcacgtaaatattgccg

SEQ ID NO: 62189 - RNA, 22 nt, Synthetic Construct
  source 1..22: mol_type = other RNA
tgaggtagtagtttatgctgtt

SEQ ID NO: 62190 - RNA, 16 nt, Synthetic Construct
  source 1..16: mol_type = other RNA
gggtctgtagctcagt

SEQ ID NO: 62191 - RNA, 16 nt, Synthetic Construct
  source 1..16: mol_type = other RNA
gggtctgtagctcagt

SEQ ID NO: 62192 - RNA, 23 nt, Synthetic Construct
  source 1..23: mol_type = other RNA
tgaggggcagagagcgagacttg

SEQ ID NO: 62193 - RNA, 23 nt, Synthetic Construct
  source 1..23: mol_type = other RNA
tgaggggcagagagcgagacttg

SEQ ID NO: 62194 - RNA, 22 nt, Synthetic Construct
  source 1..22: mol_type = other RNA
tgaggaagtaggttgtatagtt

SEQ ID NO: 62195 - RNA, 22 nt, Synthetic Construct
  source 1..22: mol_type = other RNA
tgaggaagtaggttgtatagtt

SEQ ID NO: 62196 - RNA, 20 nt, Synthetic Construct
  source 1..20: mol_type = other RNA
actgatcgagtcgtcctgcg

SEQ ID NO: 62197 - RNA, 18 nt, Synthetic Construct
  source 1..18: mol_type = other RNA
atcacattgccagggatt

SEQ ID NO: 62198 - RNA, 18 nt, Synthetic Construct
  source 1..18: mol_type = other RNA
atcacattgccagggatt

SEQ ID NO: 62199 - RNA, 21 nt, Synthetic Construct
  source 1..21: mol_type = other RNA
taactccttaagcgaatctcc

SEQ ID NO: 62200 - RNA, 21 nt, Synthetic Construct
  source 1..21: mol_type = other RNA
taactccttaagcgaatctcc

SEQ ID NO: 62201 - RNA, 24 nt, Synthetic Construct
  source 1..24: mol_type = other RNA
tgtaagcatccccgactggaagct

SEQ ID NO: 62202 - RNA, 24 nt, Synthetic Construct
  source 1..24: mol_type = other RNA
tgtaagcatccccgactggaagct

SEQ ID NO: 62203 - RNA, 21 nt, Synthetic Construct
  source 1..21: mol_type = other RNA
tagcagcacatcatggtttac

SEQ ID NO: 62204 - RNA, 41 nt, Synthetic Construct; identical to SEQ ID NO: 1233
  source 1..41: mol_type = other RNA

SEQ ID NO: 62205 - RNA, 22 nt, Synthetic Construct
  source 1..22: mol_type = other RNA
tagcagcacgtaaatactggcg

SEQ ID NO: 62206 - RNA, 22 nt, Synthetic Construct
  source 1..22: mol_type = other RNA
tagcagcacgtaaatactggcg

SEQ ID NO: 62207 - RNA, 23 nt, Synthetic Construct
  source 1..23: mol_type = other RNA
tgaggtagtaggtcgtgtggttt

SEQ ID NO: 62208 - RNA, 23 nt, Synthetic Construct
  source 1..23: mol_type = other RNA
tgaggtagtaggtcgtgtggttt

SEQ ID NO: 62209 - RNA, 27 nt, Synthetic Construct
  source 1..27: mol_type = other RNA
ccccccactgctaaatttggctggcta

SEQ ID NO: 62210 - RNA, 27 nt, Synthetic Construct
  source 1..27: mol_type = other RNA
ccccccactgctaaatttggctggcta

SEQ ID NO: 62211 - RNA, 20 nt, Synthetic Construct
  source 1..20: mol_type = other RNA
gcaataacaggtctgtgatg

SEQ ID NO: 62212 - RNA, 20 nt, Synthetic Construct
  source 1..20: mol_type = other RNA
gcaataacaggtctgtgatg

SEQ ID NO: 62213 - RNA, 15 nt, Synthetic Construct
  source 1..15: mol_type = other RNA
ggtggctgtagctca

SEQ ID NO: 62214 - RNA, 23 nt, Synthetic Construct
  source 1..23: mol_type = other RNA
ctcactgatcgagtcgtcctgcg

SEQ ID NO: 62215 - RNA, 22 nt, Synthetic Construct
  source 1..22: mol_type = other RNA
aagcagcacgtaaatattggag

SEQ ID NO: 62216 - RNA, 23 nt, Synthetic Construct
  source 1..23: mol_type = other RNA
tgaggcagtaggttgtgtggttt

SEQ ID NO: 62217 - RNA, 20 nt, Synthetic Construct
  source 1..20: mol_type = other RNA
tggggtagtaggttgtatag

SEQ ID NO: 62218 - RNA, 20 nt, Synthetic Construct
  source 1..20: mol_type = other RNA
aatgacacgatcactcccgt

SEQ ID NO: 62219 - RNA, 26 nt, Synthetic Construct
  source 1..26: mol_type = other RNA
tgtaaacatccttgactggaagcttt

SEQ ID NO: 62220 - RNA, 21 nt, Synthetic Construct
  source 1..21: mol_type = other RNA
tcctgtactgagctaccccga

SEQ ID NO: 62221 - RNA, 21 nt, Synthetic Construct
  source 1..21: mol_type = other RNA
tgaggtagtggattgtatagt

SEQ ID NO: 62222 - RNA, 21 nt, Synthetic Construct
  source 1..21: mol_type = other RNA
tgaggtagtggattgtatagt

SEQ ID NO: 62223 - RNA, 20 nt, Synthetic Construct
  source 1..20: mol_type = other RNA
attgcacttgtcccggcctg

SEQ ID NO: 62224 - RNA, 20 nt, Synthetic Construct
  source 1..20: mol_type = other RNA
attgcacttgtcccggcctg

SEQ ID NO: 62225 - RNA, 18 nt, Synthetic Construct
  source 1..18: mol_type = other RNA
tcagtagctcgaggaaaa

SEQ ID NO: 62226 - RNA, 18 nt, Synthetic Construct
  source 1..18: mol_type = other RNA
tcagtagctcgaggaaaa

SEQ ID NO: 62227 - RNA, 22 nt, Synthetic Construct
  source 1..22: mol_type = other RNA
accacagggtagaaccacggac

SEQ ID NO: 62228 - RNA, 22 nt, Synthetic Construct
  source 1..22: mol_type = other RNA
accacagggtagaaccacggac

SEQ ID NO: 62229 - RNA, 27 nt, Synthetic Construct
  source 1..27: mol_type = other RNA
cctcccactgctaaatttgactggctt

SEQ ID NO: 62230 - RNA, 27 nt, Synthetic Construct
  source 1..27: mol_type = other RNA
cctcccactgctaaatttgactggctt

SEQ ID NO: 62231 - RNA, 31 nt, Synthetic Construct; identical to SEQ ID NO: 6001
  source 1..31: mol_type = other RNA

SEQ ID NO: 62232 - RNA, 31 nt, Synthetic Construct; identical to SEQ ID NO: 6001
  source 1..31: mol_type = other RNA

SEQ ID NO: 62233 - RNA, 24 nt, Synthetic Construct
  source 1..24: mol_type = other RNA
tgcaaacatccccgactggaagct

SEQ ID NO: 62234 - RNA, 24 nt, Synthetic Construct
  source 1..24: mol_type = other RNA
tgcaaacatccccgactggaagct

SEQ ID NO: 62235 - RNA, 23 nt, Synthetic Construct
  source 1..23: mol_type = other RNA
tggtaatacgtcgtacttagtgt

SEQ ID NO: 62236 - RNA, 23 nt, Synthetic Construct
  source 1..23: mol_type = other RNA
tggtaatacgtcgtacttagtgt

SEQ ID NO: 62237 - RNA, 23 nt, Synthetic Construct
  source 1..23: mol_type = other RNA
tgtgcaaatctatgcaaaactga

SEQ ID NO: 62238 - RNA, 22 nt, Synthetic Construct
  source 1..22: mol_type = other RNA
tgaggtagtagattgaatagtt

SEQ ID NO: 62239 - RNA, 22 nt, Synthetic Construct
  source 1..22: mol_type = other RNA
tgaggtagtagattgaatagtt

SEQ ID NO: 62240 - RNA, 27 nt, Synthetic Construct
  source 1..27: mol_type = other RNA
ccccccactgctaaatttgtctggctt

SEQ ID NO: 62241 - RNA, 22 nt, Synthetic Construct
  source 1..22: mol_type = other RNA
tagcatcacgtaaatattggcg

SEQ ID NO: 62242 - RNA, 22 nt, Synthetic Construct
  source 1..22: mol_type = other RNA
tagcatcacgtaaatattggcg

SEQ ID NO: 62243 - RNA, 23 nt, Synthetic Construct
  source 1..23: mol_type = other RNA
caaagtgctgtttgtgcaggtag

SEQ ID NO: 62244 - RNA, 23 nt, Synthetic Construct
  source 1..23: mol_type = other RNA
caaagtgctgtttgtgcaggtag

SEQ ID NO: 62245 - RNA, 22 nt, Synthetic Construct
  source 1..22: mol_type = other RNA
tgaggtagaagtttgtgctgtt

SEQ ID NO: 62246 - RNA, 32 nt, Synthetic Construct; identical to SEQ ID NO: 770
  source 1..32: mol_type = other RNA

SEQ ID NO: 62247 - RNA, 23 nt, Synthetic Construct
  source 1..23: mol_type = other RNA
cctcgcgcgattggagcggccga

SEQ ID NO: 62248 - RNA, 23 nt, Synthetic Construct
  source 1..23: mol_type = other RNA
cctcgcgcgattggagcggccga

SEQ ID NO: 62249 - RNA, 27 nt, Synthetic Construct
  source 1..27: mol_type = other RNA
gctttacattggactttgaacagatct

SEQ ID NO: 62250 - RNA, 27 nt, Synthetic Construct
  source 1..27: mol_type = other RNA
gctttacattggactttgaacagatct

SEQ ID NO: 62251 - RNA, 24 nt, Synthetic Construct
  source 1..24: mol_type = other RNA
agcagcattgtacagggctatgat

SEQ ID NO: 62252 - RNA, 20 nt, Synthetic Construct
  source 1..20: mol_type = other RNA
taactccttagcgatctcgc

SEQ ID NO: 62253 - RNA, 20 nt, Synthetic Construct
  source 1..20: mol_type = other RNA
taactccttagcgatctcgc

SEQ ID NO: 62254 - RNA, 34 nt, Synthetic Construct; identical to SEQ ID NO: 6594
  source 1..34: mol_type = other RNA

SEQ ID NO: 62255 - RNA, 21 nt, Synthetic Construct
  source 1..21: mol_type = other RNA
tgaggcagtaggttgtgtggt

SEQ ID NO: 62256 - RNA, 24 nt, Synthetic Construct
  source 1..24: mol_type = other RNA
caaagtgctgttcgtgcaggtaga

SEQ ID NO: 62257 - RNA, 24 nt, Synthetic Construct
  source 1..24: mol_type = other RNA
caaagtgctgttcgtgcaggtaga

SEQ ID NO: 62258 - RNA, 21 nt, Synthetic Construct
  source 1..21: mol_type = other RNA
tgaggtagtagtttgtgccgt

SEQ ID NO: 62259 - RNA, 21 nt, Synthetic Construct
  source 1..21: mol_type = other RNA
tgaggtagtagtttgtgccgt

SEQ ID NO: 62260 - RNA, 22 nt, Synthetic Construct
  source 1..22: mol_type = other RNA
ttgtacatggtaggctttcatt

SEQ ID NO: 62261 - RNA, 22 nt, Synthetic Construct
  source 1..22: mol_type = other RNA
ttgtacatggtaggctttcatt

SEQ ID NO: 62262 - RNA, 23 nt, Synthetic Construct
  source 1..23: mol_type = other RNA
tggtagtacgacgtacttagtgt

SEQ ID NO: 62263 - RNA, 24 nt, Synthetic Construct
  source 1..24: mol_type = other RNA
tgaggtagtaggttgtgtggtttc

SEQ ID NO: 62264 - RNA, 24 nt, Synthetic Construct
  source 1..24: mol_type = other RNA
tgaggtagtaggttgtgtggtttc

SEQ ID NO: 62265 - RNA, 22 nt, Synthetic Construct
  source 1..22: mol_type = other RNA
tcgtaccgtgagtaacaatgcg

SEQ ID NO: 62266 - RNA, 22 nt, Synthetic Construct
  source 1..22: mol_type = other RNA
tcgtaccgtgagtaacaatgcg

SEQ ID NO: 62267 - RNA, 22 nt, Synthetic Construct
  source 1..22: mol_type = other RNA
tgtagcgtttcctactttatgg

SEQ ID NO: 62268 - RNA, 26 nt, Synthetic Construct
  source 1..26: mol_type = other RNA
gtgtgaaagtaggtcatcgtcaggct

SEQ ID NO: 62269 - RNA, 26 nt, Synthetic Construct
  source 1..26: mol_type = other RNA
gtgtgaaagtaggtcatcgtcaggct

SEQ ID NO: 62270 - RNA, 25 nt, Synthetic Construct
  source 1..25: mol_type = other RNA
tgaggtagtaggttgtgtggttatt

SEQ ID NO: 62271 - RNA, 25 nt, Synthetic Construct
  source 1..25: mol_type = other RNA
tgaggtagtaggttgtgtggttatt

SEQ ID NO: 62272 - RNA, 22 nt, Synthetic Construct
  source 1..22: mol_type = other RNA
tgaggtagtagtttgtgctgta

SEQ ID NO: 62273 - RNA, 22 nt, Synthetic Construct
  source 1..22: mol_type = other RNA
tgaggtagtagtttgtgctgta

SEQ ID NO: 62274 - RNA, 22 nt, Synthetic Construct
  source 1..22: mol_type = other RNA
tgaggtagtagattgtgtggtt

SEQ ID NO: 62275 - RNA, 22 nt, Synthetic Construct
  source 1..22: mol_type = other RNA
tgaggtagtagattgtgtggtt

SEQ ID NO: 62276 - RNA, 35 nt, Synthetic Construct; identical to SEQ ID NO: 9871
  source 1..35: mol_type = other RNA

SEQ ID NO: 62277 - RNA, 23 nt, Synthetic Construct
  source 1..23: mol_type = other RNA
caaagtgctgttcgtgcaagtag

SEQ ID NO: 62278 - RNA, 20 nt, Synthetic Construct
  source 1..20: mol_type = other RNA
tgacctatgaattgacagcc

SEQ ID NO: 62279 - RNA, 20 nt, Synthetic Construct
  source 1..20: mol_type = other RNA
tgacctatgaattgacagcc

SEQ ID NO: 62280 - RNA, 16 nt, Synthetic Construct
  source 1..16: mol_type = other RNA
gcaagaggtcagcggt

SEQ ID NO: 62281 - RNA, 23 nt, Synthetic Construct
  source 1..23: mol_type = other RNA
agcaacattgtctgctgggtttc

SEQ ID NO: 62282 - RNA, 22 nt, Synthetic Construct
  source 1..22: mol_type = other RNA
tgaggtggtagtttgtgctgtt

SEQ ID NO: 62283 - RNA, 39 nt, Synthetic Construct; identical to SEQ ID NO: 759
  source 1..39: mol_type = other RNA

SEQ ID NO: 62284 - RNA, 27 nt, Synthetic Construct
  source 1..27: mol_type = other RNA
ccccccactgccaaatttgactggctt

SEQ ID NO: 62285 - RNA, 27 nt, Synthetic Construct
  source 1..27: mol_type = other RNA
ccccccactgccaaatttgactggctt

SEQ ID NO: 62286 - RNA, 27 nt, Synthetic Construct
  source 1..27: mol_type = other RNA
ccccccactgctaaatttgtctggctt

SEQ ID NO: 62287 - RNA, 23 nt, Synthetic Construct
  source 1..23: mol_type = other RNA
tctctcggctcctcgcggctcgt

SEQ ID NO: 62288 - RNA, 20 nt, Synthetic Construct
  source 1..20: mol_type = other RNA
tagaattctcgcctgccacg

SEQ ID NO: 62289 - RNA, 20 nt, Synthetic Construct
  source 1..20: mol_type = other RNA
tagaattctcgcctgccacg

SEQ ID NO: 62290 - RNA, 22 nt, Synthetic Construct
  source 1..22: mol_type = other RNA
gggagtgtgacaatggtgtttg

SEQ ID NO: 62291 - RNA, 22 nt, Synthetic Construct
  source 1..22: mol_type = other RNA
gggagtgtgacaatggtgtttg

SEQ ID NO: 62292 - RNA, 27 nt, Synthetic Construct
  source 1..27: mol_type = other RNA
tcggctgttaaccgaaaggttggtggt

SEQ ID NO: 62293 - RNA, 21 nt, Synthetic Construct
  source 1..21: mol_type = other RNA
cgcaccgtgagtaataatgcg

SEQ ID NO: 62294 - RNA, 21 nt, Synthetic Construct
  source 1..21: mol_type = other RNA
cgcaccgtgagtaataatgcg

SEQ ID NO: 62295 - RNA, 23 nt, Synthetic Construct
  source 1..23: mol_type = other RNA
caaagtgctgtttgtgcaggtag

SEQ ID NO: 62296 - RNA, 23 nt, Synthetic Construct
  source 1..23: mol_type = other RNA
caaagtgctgtttgtgcaggtag

SEQ ID NO: 62297 - RNA, 22 nt, Synthetic Construct
  source 1..22: mol_type = other RNA
gtcagtttgtcaaataccccaa

SEQ ID NO: 62298 - RNA, 22 nt, Synthetic Construct
  source 1..22: mol_type = other RNA
gtcagtttgtcaaataccccaa

SEQ ID NO: 62299 - RNA, 23 nt, Synthetic Construct
  source 1..23: mol_type = other RNA
tgaggtagtaggttgtgtggtta

SEQ ID NO: 62300 - RNA, 23 nt, Synthetic Construct
  source 1..23: mol_type = other RNA
tgaggtagtaggttgtgtggtta

SEQ ID NO: 62301 - RNA, 21 nt, Synthetic Construct
  source 1..21: mol_type = other RNA
tccctgtcctccaggagctct

SEQ ID NO: 62302 - RNA, 21 nt, Synthetic Construct
  source 1..21: mol_type = other RNA
tccctgtcctccaggagctct

SEQ ID NO: 62303 - RNA, 16 nt, Synthetic Construct
  source 1..16: mol_type = other RNA
gtctacggccatacca

SEQ ID NO: 62304 - RNA, 16 nt, Synthetic Construct
  source 1..16: mol_type = other RNA
gtctacggccatacca

SEQ ID NO: 62305 - RNA, 20 nt, Synthetic Construct
  source 1..20: mol_type = other RNA
tgaggaagtaggttgtgtgg

SEQ ID NO: 62306 - RNA, 24 nt, Synthetic Construct
  source 1..24: mol_type = other RNA
tatatcggaacgtgcccagtcgtg

SEQ ID NO: 62307 - RNA, 24 nt, Synthetic Construct
  source 1..24: mol_type = other RNA
tatatcggaacgtgcccagtcgtg

SEQ ID NO: 62308 - RNA, 22 nt, Synthetic Construct
  source 1..22: mol_type = other RNA
tgaggtagaagattgtatagtt

SEQ ID NO: 62309 - RNA, 22 nt, Synthetic Construct
  source 1..22: mol_type = other RNA
tgaggtagaagattgtatagtt

SEQ ID NO: 62310 - RNA, 22 nt, Synthetic Construct
  source 1..22: mol_type = other RNA
tgaggtagtaggatgtatagtt

SEQ ID NO: 62311 - RNA, 22 nt, Synthetic Construct
  source 1..22: mol_type = other RNA
tgaggtagtaggatgtatagtt

SEQ ID NO: 62312 - RNA, 23 nt, Synthetic Construct
  source 1..23: mol_type = other RNA
ttaatgctaatcgtgataggggt

SEQ ID NO: 62313 - RNA, 24 nt, Synthetic Construct
  source 1..24: mol_type = other RNA
ttcaagtaattcaggataggttgt

SEQ ID NO: 62314 - RNA, 24 nt, Synthetic Construct
  source 1..24: mol_type = other RNA
tgtcagtttgtcaaataccccaag

SEQ ID NO: 62315 - RNA, 24 nt, Synthetic Construct
  source 1..24: mol_type = other RNA
tgtcagtttgtcaaataccccaag

SEQ ID NO: 62316 - RNA, 34 nt, Synthetic Construct; identical to SEQ ID NO: 2265
  source 1..34: mol_type = other RNA

SEQ ID NO: 62317 - RNA, 17 nt, Synthetic Construct
  source 1..17: mol_type = other RNA
ccgtgtgaaagtaggtc

SEQ ID NO: 62318 - RNA, 21 nt, Synthetic Construct
  source 1..21: mol_type = other RNA
ctagaccgaagctccttgagg

SEQ ID NO: 62319 - RNA, 30 nt, Synthetic Construct; identical to SEQ ID NO: 1122
  source 1..30: mol_type = other RNA

SEQ ID NO: 62320 - RNA, 30 nt, Synthetic Construct; identical to SEQ ID NO: 1122
  source 1..30: mol_type = other RNA

SEQ ID NO: 62321 - RNA, 33 nt, Synthetic Construct; identical to SEQ ID NO: 10232
  source 1..33: mol_type = other RNA

SEQ ID NO: 62322 - RNA, 21 nt, Synthetic Construct
  source 1..21: mol_type = other RNA
tgaggtagtgggttgtatagt

SEQ ID NO: 62323 - RNA, 16 nt, Synthetic Construct
  source 1..16: mol_type = other RNA
ggccgttcttagttgg

SEQ ID NO: 62324 - RNA, 22 nt, Synthetic Construct
  source 1..22: mol_type = other RNA
acagtagtctgcacattggtta

SEQ ID NO: 62325 - RNA, 22 nt, Synthetic Construct
  source 1..22: mol_type = other RNA
tgagatgaagcactgtagctct

SEQ ID NO: 62326 - RNA, 21 nt, Synthetic Construct
  source 1..21: mol_type = other RNA
atcacattgccagggatttcc

SEQ ID NO: 62327 - RNA, 26 nt, Synthetic Construct
  source 1..26: mol_type = other RNA
ccccccactgctaatttgactggctt

SEQ ID NO: 62328 - RNA, 19 nt, Synthetic Construct
  source 1..19: mol_type = other RNA
cctgtaccgatcaatagtg

SEQ ID NO: 62329 - RNA, 19 nt, Synthetic Construct
  source 1..19: mol_type = other RNA
cctgtaccgatcaatagtg

SEQ ID NO: 62330 - RNA, 16 nt, Synthetic Construct
  source 1..16: mol_type = other RNA
ttaatccagccagtcc

SEQ ID NO: 62331 - RNA, 16 nt, Synthetic Construct
  source 1..16: mol_type = other RNA
ttaatccagccagtcc

SEQ ID NO: 62332 - RNA, 20 nt, Synthetic Construct
  source 1..20: mol_type = other RNA
tccccggcacctccaccatt

SEQ ID NO: 62333 - RNA, 20 nt, Synthetic Construct
  source 1..20: mol_type = other RNA
tccccggcacctccaccatt

SEQ ID NO: 62334 - RNA, 29 nt, Synthetic Construct
  source 1..29: mol_type = other RNA
gcgccgctggtgtagtggtatcatgcaag

SEQ ID NO: 62335 - RNA, 29 nt, Synthetic Construct
  source 1..29: mol_type = other RNA
gcgccgctggtgtagtggtatcatgcaag

SEQ ID NO: 62336 - RNA, 17 nt, Synthetic Construct
  source 1..17: mol_type = other RNA
cagtcaggatgttggct

SEQ ID NO: 62337 - RNA, 22 nt, Synthetic Construct
  source 1..22: mol_type = other RNA
tcctgtaatgagctgccccgag

SEQ ID NO: 62338 - RNA, 22 nt, Synthetic Construct
  source 1..22: mol_type = other RNA
tcctgtaatgagctgccccgag

SEQ ID NO: 62339 - RNA, 21 nt, Synthetic Construct
  source 1..21: mol_type = other RNA
tgtaccgtgagtaataatgcg

SEQ ID NO: 62340 - RNA, 21 nt, Synthetic Construct
  source 1..21: mol_type = other RNA
tgtaccgtgagtaataatgcg

SEQ ID NO: 62341 - RNA, 23 nt, Synthetic Construct
  source 1..23: mol_type = other RNA
tgtgcaaatccatgcaaaactga

SEQ ID NO: 62342 - RNA, 23 nt, Synthetic Construct
  source 1..23: mol_type = other RNA
tgtgcaaatccatgcaaaactga

SEQ ID NO: 62343 - RNA, 36 nt, Synthetic Construct; identical to SEQ ID NO: 752
  source 1..36: mol_type = other RNA

SEQ ID NO: 62344 - RNA, 36 nt, Synthetic Construct; identical to SEQ ID NO: 752
  source 1..36: mol_type = other RNA

SEQ ID NO: 62345 - RNA, 22 nt, Synthetic Construct
  source 1..22: mol_type = other RNA
actcggcgtggcgtcggtcgtg

SEQ ID NO: 62346 - RNA, 22 nt, Synthetic Construct
  source 1..22: mol_type = other RNA
actcggcgtggcgtcggtcgtg

SEQ ID NO: 62347 - RNA, 17 nt, Synthetic Construct
  source 1..17: mol_type = other RNA
ggagtatggtcgcaagg

SEQ ID NO: 62348 - RNA, 17 nt, Synthetic Construct
  source 1..17: mol_type = other RNA
ggagtatggtcgcaagg

SEQ ID NO: 62349 - RNA, 23 nt, Synthetic Construct
  source 1..23: mol_type = other RNA
caaagtgctattcgtgcaggtag

SEQ ID NO: 62350 - RNA, 22 nt, Synthetic Construct
  source 1..22: mol_type = other RNA
tgtaaacatccccgactggaaa

SEQ ID NO: 62351 - RNA, 23 nt, Synthetic Construct
  source 1..23: mol_type = other RNA
tcctgcactgagctgccccgagt

SEQ ID NO: 62352 - RNA, 23 nt, Synthetic Construct
  source 1..23: mol_type = other RNA
tcctgcactgagctgccccgagt

SEQ ID NO: 62353 - RNA, 24 nt, Synthetic Construct
  source 1..24: mol_type = other RNA
tgaggggcagagagcgagacttta

SEQ ID NO: 62354 - RNA, 24 nt, Synthetic Construct
  source 1..24: mol_type = other RNA
tgaggggcagagagcgagacttta

SEQ ID NO: 62355 - RNA, 16 nt, Synthetic Construct
  source 1..16: mol_type = other RNA
atgcaagtcgaacggt

SEQ ID NO: 62356 - RNA, 16 nt, Synthetic Construct
  source 1..16: mol_type = other RNA
atgcaagtcgaacggt

SEQ ID NO: 62357 - RNA, 22 nt, Synthetic Construct
  source 1..22: mol_type = other RNA
tgaggtagtaggtagtgtggtt

SEQ ID NO: 62358 - RNA, 32 nt, Synthetic Construct; identical to SEQ ID NO: 5582
  source 1..32: mol_type = other RNA

SEQ ID NO: 62359 - RNA, 22 nt, Synthetic Construct
  source 1..22: mol_type = other RNA
tgaggtagtaggttgtgctgtt

SEQ ID NO: 62360 - RNA, 23 nt, Synthetic Construct
  source 1..23: mol_type = other RNA
tggtaattcgacgtacttagtgt

SEQ ID NO: 62361 - RNA, 23 nt, Synthetic Construct
  source 1..23: mol_type = other RNA
tggtaattcgacgtacttagtgt

SEQ ID NO: 62362 - RNA, 22 nt, Synthetic Construct
  source 1..22: mol_type = other RNA
tgaggtagtagtttgcgctgtt

SEQ ID NO: 62363 - RNA, 15 nt, Synthetic Construct
  source 1..15: mol_type = other RNA
acctgcatcgagggt

SEQ ID NO: 62364 - RNA, 23 nt, Synthetic Construct
  source 1..23: mol_type = other RNA
caacggaatcccagaagcagctg

SEQ ID NO: 62365 - RNA, 23 nt, Synthetic Construct
  source 1..23: mol_type = other RNA
caacggaatcccagaagcagctg

SEQ ID NO: 62366 - RNA, 23 nt, Synthetic Construct
  source 1..23: mol_type = other RNA
tgtcagtttgtcaaataccccaa

SEQ ID NO: 62367 - RNA, 23 nt, Synthetic Construct
  source 1..23: mol_type = other RNA
taatactgccgggtaatgatgga

SEQ ID NO: 62368 - RNA, 21 nt, Synthetic Construct
  source 1..21: mol_type = other RNA
aaaccgttaccattactgagt

SEQ ID NO: 62369 - RNA, 22 nt, Synthetic Construct
  source 1..22: mol_type = other RNA
tggaatgtaaagaagtatgtat

SEQ ID NO: 62370 - RNA, 22 nt, Synthetic Construct
  source 1..22: mol_type = other RNA
tggaatgtaaagaagtatgtat

SEQ ID NO: 62371 - RNA, 15 nt, Synthetic Construct
  source 1..15: mol_type = other RNA
gctttgatccggaga

SEQ ID NO: 62372 - RNA, 24 nt, Synthetic Construct
  source 1..24: mol_type = other RNA
tagcagcacgtaaatattggcgtt

SEQ ID NO: 62373 - RNA, 24 nt, Synthetic Construct
  source 1..24: mol_type = other RNA
tagcagcacgtaaatattggcgtt

SEQ ID NO: 62374 - RNA, 22 nt, Synthetic Construct
  source 1..22: mol_type = other RNA
tgaggtagtagattgtatagta

SEQ ID NO: 62375 - RNA, 22 nt, Synthetic Construct
  source 1..22: mol_type = other RNA
tgaggtagtagattgtatagta

SEQ ID NO: 62376 - RNA, 21 nt, Synthetic Construct
  source 1..21: mol_type = other RNA
tgaggtaggaggttgtatagt

SEQ ID NO: 62377 - RNA, 21 nt, Synthetic Construct
  source 1..21: mol_type = other RNA
tgaggtaggaggttgtatagt

SEQ ID NO: 62378 - RNA, 23 nt, Synthetic Construct
  source 1..23: mol_type = other RNA
tgtcagtttgtcgaataccccaa

SEQ ID NO: 62379 - RNA, 44 nt, Synthetic Construct; identical to SEQ ID NO: 5536
  source 1..44: mol_type = other RNA

SEQ ID NO: 62380 - RNA, 23 nt, Synthetic Construct
  source 1..23: mol_type = other RNA
tagcagcacataatggtttgtgg

SEQ ID NO: 62381 - RNA, 23 nt, Synthetic Construct
  source 1..23: mol_type = other RNA
tagcagcacataatggtttgtgg

SEQ ID NO: 62382 - RNA, 21 nt, Synthetic Construct
  source 1..21: mol_type = other RNA
attgcacttgtcccggcctgt

SEQ ID NO: 62383 - RNA, 27 nt, Synthetic Construct
  source 1..27: mol_type = other RNA
gttggttcaagcgtgtagtcgtgctct

SEQ ID NO: 62384 - RNA, 23 nt, Synthetic Construct
  source 1..23: mol_type = other RNA
tgaggtagtaggttgtgtggttg

SEQ ID NO: 62385 - RNA, 21 nt, Synthetic Construct
  source 1..21: mol_type = other RNA
actcggcgtggcgtcggtcgt

SEQ ID NO: 62386 - RNA, 21 nt, Synthetic Construct
  source 1..21: mol_type = other RNA
actcggcgtggcgtcggtcgt

SEQ ID NO: 62387 - RNA, 23 nt, Synthetic Construct
  source 1..23: mol_type = other RNA
tcctgtactgagctgacccgaga

SEQ ID NO: 62388 - RNA, 23 nt, Synthetic Construct
  source 1..23: mol_type = other RNA
tcctgtactgagctgacccgaga

SEQ ID NO: 62389 - RNA, 22 nt, Synthetic Construct
  source 1..22: mol_type = other RNA
tagtgggttatcagaacttatt

SEQ ID NO: 62390 - RNA, 22 nt, Synthetic Construct
  source 1..22: mol_type = other RNA
aaaagctgggttgagagggcga

SEQ ID NO: 62391 - RNA, 23 nt, Synthetic Construct
  source 1..23: mol_type = other RNA
agctacattgtctgctgggttcc

SEQ ID NO: 62392 - RNA, 23 nt, Synthetic Construct
  source 1..23: mol_type = other RNA
agctacattgtctgctgggttcc

SEQ ID NO: 62393 - RNA, 19 nt, Synthetic Construct
  source 1..19: mol_type = other RNA
gaaaagctgggttgagagg

SEQ ID NO: 62394 - RNA, 23 nt, Synthetic Construct
  source 1..23: mol_type = other RNA
tggtaattcgacgtacttagtgt

SEQ ID NO: 62395 - RNA, 23 nt, Synthetic Construct
  source 1..23: mol_type = other RNA
caacggaatcccagaagcagctg

SEQ ID NO: 62396 - RNA, 23 nt, Synthetic Construct
  source 1..23: mol_type = other RNA
caacggaatcccagaagcagctg

SEQ ID NO: 62397 - RNA, 22 nt, Synthetic Construct
  source 1..22: mol_type = other RNA
tgaggtagtaggttgtgaggtt

SEQ ID NO: 62398 - RNA, 25 nt, Synthetic Construct
  source 1..25: mol_type = other RNA
aatgacacgatcactcccgttgagt

SEQ ID NO: 62399 - RNA, 25 nt, Synthetic Construct
  source 1..25: mol_type = other RNA
aatgacacgatcactcccgttgagt

SEQ ID NO: 62400 - RNA, 21 nt, Synthetic Construct
  source 1..21: mol_type = other RNA
tcctgtacagagctgccccga

SEQ ID NO: 62401 - RNA, 23 nt, Synthetic Construct
  source 1..23: mol_type = other RNA
caaagtgctgttcgtgcaggcag

SEQ ID NO: 62402 - RNA, 20 nt, Synthetic Construct
  source 1..20: mol_type = other RNA
agcagcattgtacagggcta

SEQ ID NO: 62403 - RNA, 20 nt, Synthetic Construct
  source 1..20: mol_type = other RNA
agcagcattgtacagggcta

SEQ ID NO: 62404 - RNA, 21 nt, Synthetic Construct
  source 1..21: mol_type = other RNA
tcctgtactgagctgctccga

SEQ ID NO: 62405 - RNA, 22 nt, Synthetic Construct
  source 1..22: mol_type = other RNA
tggctcagttcagcaggaacgg

SEQ ID NO: 62406 - RNA, 22 nt, Synthetic Construct
  source 1..22: mol_type = other RNA
tggctcagttcagcaggaacgg

SEQ ID NO: 62407 - RNA, 22 nt, Synthetic Construct
  source 1..22: mol_type = other RNA
tgaggtagtagtttgtgttgtt

SEQ ID NO: 62408 - RNA, 31 nt, Synthetic Construct
  source 1..31: mol_type = other RNA
gtggggggcccaagtccttctgatcgaggcc

SEQ ID NO: 62409 - RNA, 17 nt, Synthetic Construct
  source 1..17: mol_type = other RNA
cagagacgagtcgacca

SEQ ID NO: 62410 - RNA, 17 nt, Synthetic Construct
  source 1..17: mol_type = other RNA
cagagacgagtcgacca

SEQ ID NO: 62411 - RNA, 21 nt, Synthetic Construct
  source 1..21: mol_type = other RNA
tgaggtagtgggttgtgtggt

SEQ ID NO: 62412 - RNA, 23 nt, Synthetic Construct
  source 1..23: mol_type = other RNA
taaagtgctgttcgtgcaggtag

SEQ ID NO: 62413 - RNA, 23 nt, Synthetic Construct
  source 1..23: mol_type = other RNA
taaagtgctgttcgtgcaggtag

SEQ ID NO: 62414 - RNA, 20 nt, Synthetic Construct
  source 1..20: mol_type = other RNA
gtgccgaagctgtgggattg

SEQ ID NO: 62415 - RNA, 20 nt, Synthetic Construct
  source 1..20: mol_type = other RNA
gtgccgaagctgtgggattg

SEQ ID NO: 62416 - RNA, 21 nt, Synthetic Construct
  source 1..21: mol_type = other RNA
tgaggcagtagattgtatagt

SEQ ID NO: 62417 - RNA, 21 nt, Synthetic Construct
  source 1..21: mol_type = other RNA
tctcccaacccttgtaccagt

SEQ ID NO: 62418 - RNA, 21 nt, Synthetic Construct
  source 1..21: mol_type = other RNA
tctcccaacccttgtaccagt

SEQ ID NO: 62419 - RNA, 22 nt, Synthetic Construct
  source 1..22: mol_type = other RNA
tgaggtagtagtttgtgcggtt

SEQ ID NO: 62420 - RNA, 21 nt, Synthetic Construct
  source 1..21: mol_type = other RNA
cgtaccgtgagtaatagtgcg

SEQ ID NO: 62421 - RNA, 22 nt, Synthetic Construct
  source 1..22: mol_type = other RNA
tcttggagtaggtcattgggtg

SEQ ID NO: 62422 - RNA, 22 nt, Synthetic Construct
  source 1..22: mol_type = other RNA
tcttggagtaggtcattgggtg

SEQ ID NO: 62423 - RNA, 32 nt, Synthetic Construct; identical to SEQ ID NO: 1238
  source 1..32: mol_type = other RNA

SEQ ID NO: 62424 - RNA, 18 nt, Synthetic Construct
  source 1..18: mol_type = other RNA
tccgacatgcgagggttc

SEQ ID NO: 62425 - RNA, 21 nt, Synthetic Construct
  source 1..21: mol_type = other RNA
tgaggtagtaggttgtatagt

SEQ ID NO: 62426 - RNA, 21 nt, Synthetic Construct
  source 1..21: mol_type = other RNA
cgaggtagtaggttgtgtggt

SEQ ID NO: 62427 - RNA, 22 nt, Synthetic Construct
  source 1..22: mol_type = other RNA
cataaagtagaaagcactacta

SEQ ID NO: 62428 - RNA, 22 nt, Synthetic Construct
  source 1..22: mol_type = other RNA
cataaagtagaaagcactacta

SEQ ID NO: 62429 - RNA, 27 nt, Synthetic Construct
  source 1..27: mol_type = other RNA
ccccccacggctaaatttgactggctt

SEQ ID NO: 62430 - RNA, 23 nt, Synthetic Construct
  source 1..23: mol_type = other RNA
tggtaatgcgacgtacttagtgt

SEQ ID NO: 62431 - RNA, 23 nt, Synthetic Construct
  source 1..23: mol_type = other RNA
tacagtagtctgcacattggtta

SEQ ID NO: 62432 - RNA, 20 nt, Synthetic Construct
  source 1..20: mol_type = other RNA
aattgcacggtatccatctg

SEQ ID NO: 62433 - RNA, 20 nt, Synthetic Construct
  source 1..20: mol_type = other RNA
aattgcacggtatccatctg

SEQ ID NO: 62434 - RNA, 23 nt, Synthetic Construct
  source 1..23: mol_type = other RNA
agcagcattgtacagggctatga

SEQ ID NO: 62435 - RNA, 19 nt, Synthetic Construct
  source 1..19: mol_type = other RNA
tccctgagaccctaacttg

SEQ ID NO: 62436 - RNA, 19 nt, Synthetic Construct
  source 1..19: mol_type = other RNA
tccctgagaccctaacttg

SEQ ID NO: 62437 - RNA, 38 nt, Synthetic Construct; identical to SEQ ID NO: 7148
  source 1..38: mol_type = other RNA

SEQ ID NO: 62438 - RNA, 38 nt, Synthetic Construct; identical to SEQ ID NO: 7148
  source 1..38: mol_type = other RNA

SEQ ID NO: 62439 - RNA, 21 nt, Synthetic Construct
  source 1..21: mol_type = other RNA
tagcagcacatcatggtttac

SEQ ID NO: 62440 - RNA, 21 nt, Synthetic Construct
  source 1..21: mol_type = other RNA
tagcagcacatcatggtttac

SEQ ID NO: 62441 - RNA, 21 nt, Synthetic Construct
  source 1..21: mol_type = other RNA
taatactgcctggtaatgatg

SEQ ID NO: 62442 - RNA, 21 nt, Synthetic Construct
  source 1..21: mol_type = other RNA
tcctgtactgggctgccccga

SEQ ID NO: 62443 - RNA, 22 nt, Synthetic Construct
  source 1..22: mol_type = other RNA
tgaggtagtagattgtatggtt

SEQ ID NO: 62444 - RNA, 26 nt, Synthetic Construct
  source 1..26: mol_type = other RNA
tccctggtggtctagtggttaggatt

SEQ ID NO: 62445 - RNA, 21 nt, Synthetic Construct
  source 1..21: mol_type = other RNA
cccataaagtagaaagcacta

SEQ ID NO: 62446 - RNA, 22 nt, Synthetic Construct
  source 1..22: mol_type = other RNA
tcgtaccgtgagtaataatgtg

SEQ ID NO: 62447 - RNA, 18 nt, Synthetic Construct
  source 1..18: mol_type = other RNA
ggtagcgtggccgagcgg

SEQ ID NO: 62448 - RNA, 34 nt, Synthetic Construct; identical to SEQ ID NO: 16999
  source 1..34: mol_type = other RNA

SEQ ID NO: 62449 - RNA, 22 nt, Synthetic Construct
  source 1..22: mol_type = other RNA
tgaggtagtagttcgtgctgtt

SEQ ID NO: 62450 - RNA, 22 nt, Synthetic Construct
  source 1..22: mol_type = other RNA
tgaggaagtagattgtatagtt

SEQ ID NO: 62451 - RNA, 22 nt, Synthetic Construct
  source 1..22: mol_type = other RNA
tgaggaagtagattgtatagtt

SEQ ID NO: 62452 - RNA, 22 nt, Synthetic Construct
  source 1..22: mol_type = other RNA
tggaatgtaaagaggtatgtat

SEQ ID NO: 62453 - RNA, 21 nt, Synthetic Construct
  source 1..21: mol_type = other RNA
tgaggtagtagactgtatagt

SEQ ID NO: 62454 - RNA, 21 nt, Synthetic Construct
  source 1..21: mol_type = other RNA
tgaggtagtagactgtatagt

SEQ ID NO: 62455 - RNA, 24 nt, Synthetic Construct
  source 1..24: mol_type = other RNA
tgtaaacatccccgactggaagtt

SEQ ID NO: 62456 - RNA, 24 nt, Synthetic Construct
  source 1..24: mol_type = other RNA
tgtaaacatccccgactggaagtt

SEQ ID NO: 62457 - RNA, 21 nt, Synthetic Construct
  source 1..21: mol_type = other RNA
tcaggctcagtcccctcccga

SEQ ID NO: 62458 - RNA, 21 nt, Synthetic Construct
  source 1..21: mol_type = other RNA
tcaggctcagtcccctcccga

SEQ ID NO: 62459 - RNA, 22 nt, Synthetic Construct
  source 1..22: mol_type = other RNA
cgactcttagcggtggatcact

SEQ ID NO: 62460 - RNA, 25 nt, Synthetic Construct
  source 1..25: mol_type = other RNA
atttccccttggggttgtaggacca

SEQ ID NO: 62461 - RNA, 25 nt, Synthetic Construct
  source 1..25: mol_type = other RNA
atttccccttggggttgtaggacca

SEQ ID NO: 62462 - RNA, 25 nt, Synthetic Construct
  source 1..25: mol_type = other RNA
tcgggcctggttagtacttggatgg

SEQ ID NO: 62463 - RNA, 23 nt, Synthetic Construct
  source 1..23: mol_type = other RNA
tgaggtagtagattgtatagttc

SEQ ID NO: 62464 - RNA, 23 nt, Synthetic Construct
  source 1..23: mol_type = other RNA
tgaggtagtagattgtatagttc

SEQ ID NO: 62465 - RNA, 20 nt, Synthetic Construct
  source 1..20: mol_type = other RNA
cgaggtagtaggttgtatag

SEQ ID NO: 62466 - RNA, 21 nt, Synthetic Construct
  source 1..21: mol_type = other RNA
taactccttaagcgaatctcc

SEQ ID NO: 62467 - RNA, 21 nt, Synthetic Construct
  source 1..21: mol_type = other RNA
taactccttaagcgaatctcc

SEQ ID NO: 62468 - RNA, 21 nt, Synthetic Construct
  source 1..21: mol_type = other RNA
taaggtagtaggttgtatagt

SEQ ID NO: 62469 - RNA, 22 nt, Synthetic Construct
  source 1..22: mol_type = other RNA
tcgtaccgagagtaataatgcg

SEQ ID NO: 62470 - RNA, 22 nt, Synthetic Construct
  source 1..22: mol_type = other RNA
tcgtaccgagagtaataatgcg

SEQ ID NO: 62471 - RNA, 23 nt, Synthetic Construct
  source 1..23: mol_type = other RNA
tgaggtagtaggttgtgtggtct

SEQ ID NO: 62472 - RNA, 23 nt, Synthetic Construct
  source 1..23: mol_type = other RNA
tggtaatacgacgtacttaatgt

SEQ ID NO: 62473 - RNA, 23 nt, Synthetic Construct
  source 1..23: mol_type = other RNA
tggtaatacgacgtacttaatgt

SEQ ID NO: 62474 - RNA, 22 nt, Synthetic Construct
  source 1..22: mol_type = other RNA
ttatggtttgcctgggactgaa

SEQ ID NO: 62475 - RNA, 22 nt, Synthetic Construct
  source 1..22: mol_type = other RNA
ttatggtttgcctgggactgaa

SEQ ID NO: 62476 - RNA, 22 nt, Synthetic Construct
  source 1..22: mol_type = other RNA
ctttgttcgattccgttgagta

SEQ ID NO: 62477 - RNA, 22 nt, Synthetic Construct
  source 1..22: mol_type = other RNA
tgaagtagtagtttgtgctgtt

SEQ ID NO: 62478 - RNA, 20 nt, Synthetic Construct
  source 1..20: mol_type = other RNA
tgaggtagtaggtcgtgtgg

SEQ ID NO: 62479 - RNA, 29 nt, Synthetic Construct
  source 1..29: mol_type = other RNA
cccgtgtgaaagtaggtcatcgtcaggct

SEQ ID NO: 62480 - RNA, 23 nt, Synthetic Construct
  source 1..23: mol_type = other RNA
tcctgtactgggctgccccgagt

SEQ ID NO: 62481 - RNA, 23 nt, Synthetic Construct
  source 1..23: mol_type = other RNA
cgacggaatcccaaaagcagctg

SEQ ID NO: 62482 - RNA, 24 nt, Synthetic Construct
  source 1..24: mol_type = other RNA
tgagaactgaattccatgggttgt

SEQ ID NO: 62483 - RNA, 20 nt, Synthetic Construct
  source 1..20: mol_type = other RNA
agctacattgtctgctgggt

SEQ ID NO: 62484 - RNA, 20 nt, Synthetic Construct
  source 1..20: mol_type = other RNA
agctacattgtctgctgggt

SEQ ID NO: 62485 - RNA, 31 nt, Synthetic Construct; identical to SEQ ID NO: 5943
  source 1..31: mol_type = other RNA

SEQ ID NO: 62486 - RNA, 23 nt, Synthetic Construct
  source 1..23: mol_type = other RNA
tacagtagtctgcacattggtta

SEQ ID NO: 62487 - RNA, 23 nt, Synthetic Construct
  source 1..23: mol_type = other RNA
tacagtagtctgcacattggtta

SEQ ID NO: 62488 - RNA, 20 nt, Synthetic Construct
  source 1..20: mol_type = other RNA
caggacagtgaaacgagtca

SEQ ID NO: 62489 - RNA, 37 nt, Synthetic Construct; identical to SEQ ID NO: 2447
  source 1..37: mol_type = other RNA

SEQ ID NO: 62490 - RNA, 16 nt, Synthetic Construct
  source 1..16: mol_type = other RNA
gaacgtgagctgggtt

SEQ ID NO: 62491 - RNA, 16 nt, Synthetic Construct
  source 1..16: mol_type = other RNA
gaacgtgagctgggtt

SEQ ID NO: 62492 - RNA, 26 nt, Synthetic Construct
  source 1..26: mol_type = other RNA
tccctggtggtctagtggttaggatt

SEQ ID NO: 62493 - RNA, 26 nt, Synthetic Construct
  source 1..26: mol_type = other RNA
tccctggtggtctagtggttaggatt

SEQ ID NO: 62494 - RNA, 21 nt, Synthetic Construct
  source 1..21: mol_type = other RNA
acacatgcaagtcgaacggta

SEQ ID NO: 62495 - RNA, 31 nt, Synthetic Construct; identical to SEQ ID NO: 5943
  source 1..31: mol_type = other RNA

SEQ ID NO: 62496 - RNA, 23 nt, Synthetic Construct
  source 1..23: mol_type = other RNA
tcagtgcatcacagaactttgtt

SEQ ID NO: 62497 - RNA, 15 nt, Synthetic Construct
  source 1..15: mol_type = other RNA
agttgaccgcctggg

SEQ ID NO: 62498 - RNA, 21 nt, Synthetic Construct
  source 1..21: mol_type = other RNA
aatggcgccactagggttgtg

SEQ ID NO: 62499 - RNA, 22 nt, Synthetic Construct
  source 1..22: mol_type = other RNA
tattgcacttgtctcggcctgt

SEQ ID NO: 62500 - RNA, 22 nt, Synthetic Construct
  source 1..22: mol_type = other RNA
tattgcacttgtctcggcctgt

SEQ ID NO: 62501 - RNA, 22 nt, Synthetic Construct
  source 1..22: mol_type = other RNA
ttcaccaccttctccacccagc

SEQ ID NO: 62502 - RNA, 23 nt, Synthetic Construct
  source 1..23: mol_type = other RNA
taacactgtctggtaacgatgtt

SEQ ID NO: 62503 - RNA, 23 nt, Synthetic Construct
  source 1..23: mol_type = other RNA
taacactgtctggtaacgatgtt

SEQ ID NO: 62504 - RNA, 27 nt, Synthetic Construct
  source 1..27: mol_type = other RNA
ccccccactgctaagtttgactggctt

SEQ ID NO: 62505 - RNA, 27 nt, Synthetic Construct
  source 1..27: mol_type = other RNA
ccccccactgctaagtttgactggctt

SEQ ID NO: 62506 - RNA, 15 nt, Synthetic Construct
  source 1..15: mol_type = other RNA
acccttgtcattagt

SEQ ID NO: 62507 - RNA, 22 nt, Synthetic Construct
  source 1..22: mol_type = other RNA
tcctgtactgagctgccccgat

SEQ ID NO: 62508 - RNA, 22 nt, Synthetic Construct
  source 1..22: mol_type = other RNA
tcctgtactgagctgccccgat

SEQ ID NO: 62509 - RNA, 22 nt, Synthetic Construct
  source 1..22: mol_type = other RNA
tagcagcacgtaaacattggcg

SEQ ID NO: 62510 - RNA, 22 nt, Synthetic Construct
  source 1..22: mol_type = other RNA
tagcagcacgtaaacattggcg

SEQ ID NO: 62511 - RNA, 22 nt, Synthetic Construct
  source 1..22: mol_type = other RNA
tagcagcacataaatattggcg

SEQ ID NO: 62512 - RNA, 22 nt, Synthetic Construct
  source 1..22: mol_type = other RNA
tagcagcacataaatattggcg

SEQ ID NO: 62513 - RNA, 20 nt, Synthetic Construct
  source 1..20: mol_type = other RNA
cccgtgttcggaagattttc

SEQ ID NO: 62514 - RNA, 21 nt, Synthetic Construct
  source 1..21: mol_type = other RNA
caacggaatcccaaaagcagc

SEQ ID NO: 62515 - RNA, 25 nt, Synthetic Construct
  source 1..25: mol_type = other RNA
ggtaaaattgctgagtgaagcattg

SEQ ID NO: 62516 - RNA, 22 nt, Synthetic Construct
  source 1..22: mol_type = other RNA
tgggatgagggattgaagtgga

SEQ ID NO: 62517 - RNA, 25 nt, Synthetic Construct
  source 1..25: mol_type = other RNA
gtcaggatggccgagcggtctaagg

SEQ ID NO: 62518 - RNA, 32 nt, Synthetic Construct; identical to SEQ ID NO: 18425
  source 1..32: mol_type = other RNA

SEQ ID NO: 62519 - RNA, 24 nt, Synthetic Construct
  source 1..24: mol_type = other RNA
tgtaaacatccccgactggaagcg

SEQ ID NO: 62520 - RNA, 22 nt, Synthetic Construct
  source 1..22: mol_type = other RNA
taactcctaaagcgaatctcgc

SEQ ID NO: 62521 - RNA, 22 nt, Synthetic Construct
  source 1..22: mol_type = other RNA
taactcctaaagcgaatctcgc

SEQ ID NO: 62522 - RNA, 27 nt, Synthetic Construct
  source 1..27: mol_type = other RNA
ccccccactgctaaatttgactagctt

SEQ ID NO: 62523 - RNA, 27 nt, Synthetic Construct
  source 1..27: mol_type = other RNA
ccccccactgctaaatttgactagctt

SEQ ID NO: 62524 - RNA, 21 nt, Synthetic Construct
  source 1..21: mol_type = other RNA
tttgttcgttcggctcgcgtg

SEQ ID NO: 62525 - RNA, 21 nt, Synthetic Construct
  source 1..21: mol_type = other RNA
tttgttcgttcggctcgcgtg

SEQ ID NO: 62526 - RNA, 22 nt, Synthetic Construct
  source 1..22: mol_type = other RNA
tgaggtagtagtttgtgctggt

SEQ ID NO: 62527 - RNA, 22 nt, Synthetic Construct
  source 1..22: mol_type = other RNA
tgaggtagtagtttgtgctggt

SEQ ID NO: 62528 - RNA, 26 nt, Synthetic Construct
  source 1..26: mol_type = other RNA
tgtcggctcatctcatcctggggctg

SEQ ID NO: 62529 - RNA, 21 nt, Synthetic Construct
  source 1..21: mol_type = other RNA
tagcaccatctgaaatcggta

SEQ ID NO: 62530 - RNA, 22 nt, Synthetic Construct
  source 1..22: mol_type = other RNA
tggagtgtgacaatggtgtttt

SEQ ID NO: 62531 - RNA, 24 nt, Synthetic Construct
  source 1..24: mol_type = other RNA
gaggtgtagaataggtgggagctt

SEQ ID NO: 62532 - RNA, 41 nt, Synthetic Construct; identical to SEQ ID NO: 1667
  source 1..41: mol_type = other RNA

SEQ ID NO: 62533 - RNA, 41 nt, Synthetic Construct; identical to SEQ ID NO: 1667
  source 1..41: mol_type = other RNA

SEQ ID NO: 62534 - RNA, 23 nt, Synthetic Construct
  source 1..23: mol_type = other RNA
ggcagcattgtacagggctatga

SEQ ID NO: 62535 - RNA, 23 nt, Synthetic Construct
  source 1..23: mol_type = other RNA
ggcagcattgtacagggctatga

SEQ ID NO: 62536 - RNA, 26 nt, Synthetic Construct
  source 1..26: mol_type = other RNA
ttctcactactgcacttgactagtct

SEQ ID NO: 62537 - RNA, 26 nt, Synthetic Construct
  source 1..26: mol_type = other RNA
ttctcactactgcacttgactagtct

SEQ ID NO: 62538 - RNA, 21 nt, Synthetic Construct
  source 1..21: mol_type = other RNA
tgaggtggtaggttgtgtggt

SEQ ID NO: 62539 - RNA, 27 nt, Synthetic Construct
  source 1..27: mol_type = other RNA
ccgtgtgaaagtaggtcatcgtcaggc

SEQ ID NO: 62540 - RNA, 34 nt, Synthetic Construct; identical to SEQ ID NO: 13733
  source 1..34: mol_type = other RNA

SEQ ID NO: 62541 - RNA, 20 nt, Synthetic Construct
  source 1..20: mol_type = other RNA
gtgccgaagctgtgggattg

SEQ ID NO: 62542 - RNA, 27 nt, Synthetic Construct
  source 1..27: mol_type = other RNA
ccccccactgctagatttgactggctt

SEQ ID NO: 62543 - RNA, 22 nt, Synthetic Construct
  source 1..22: mol_type = other RNA
tcctgtactgagctgtcccgag

SEQ ID NO: 62544 - RNA, 21 nt, Synthetic Construct
  source 1..21: mol_type = other RNA
tgaggtggtaggttgtatagt

SEQ ID NO: 62545 - RNA, 24 nt, Synthetic Construct
  source 1..24: mol_type = other RNA
cgtaaacatccccgactggaagct

SEQ ID NO: 62546 - RNA, 22 nt, Synthetic Construct
  source 1..22: mol_type = other RNA
tgaggtagtagattgtatagct

SEQ ID NO: 62547 - RNA, 22 nt, Synthetic Construct
  source 1..22: mol_type = other RNA
tgaggtagtagattgtatagct

SEQ ID NO: 62548 - RNA, 24 nt, Synthetic Construct
  source 1..24: mol_type = other RNA
tgtaaacgtccccgactggaagct

SEQ ID NO: 62549 - RNA, 24 nt, Synthetic Construct
  source 1..24: mol_type = other RNA
tgtaaacgtccccgactggaagct

SEQ ID NO: 62550 - RNA, 20 nt, Synthetic Construct
  source 1..20: mol_type = other RNA
acccttgtcattagttgcta

SEQ ID NO: 62551 - RNA, 23 nt, Synthetic Construct
  source 1..23: mol_type = other RNA
gactatagaactttccccctcat

SEQ ID NO: 62552 - RNA, 23 nt, Synthetic Construct
  source 1..23: mol_type = other RNA
gactatagaactttccccctcat

SEQ ID NO: 62553 - RNA, 23 nt, Synthetic Construct
  source 1..23: mol_type = other RNA
cattgcacttgtctcggtctgaa

SEQ ID NO: 62554 - RNA, 23 nt, Synthetic Construct
  source 1..23: mol_type = other RNA
cattgcacttgtctcggtctgaa

SEQ ID NO: 62555 - RNA, 18 nt, Synthetic Construct
  source 1..18: mol_type = other RNA
cctcgcgcgattggagcg

SEQ ID NO: 62556 - RNA, 18 nt, Synthetic Construct
  source 1..18: mol_type = other RNA
cctcgcgcgattggagcg

SEQ ID NO: 62557 - RNA, 22 nt, Synthetic Construct
  source 1..22: mol_type = other RNA
tgtagtgtctcctactttatgg

SEQ ID NO: 62558 - RNA, 24 nt, Synthetic Construct
  source 1..24: mol_type = other RNA
tgtaaacatccccggctggaagct

SEQ ID NO: 62559 - RNA, 22 nt, Synthetic Construct
  source 1..22: mol_type = other RNA
gcacattacacggtcgacctct

SEQ ID NO: 62560 - RNA, 22 nt, Synthetic Construct
  source 1..22: mol_type = other RNA
gcacattacacggtcgacctct

SEQ ID NO: 62561 - RNA, 22 nt, Synthetic Construct
  source 1..22: mol_type = other RNA
tagcagcatgtaaatattggcg

SEQ ID NO: 62562 - RNA, 22 nt, Synthetic Construct
  source 1..22: mol_type = other RNA
tgtagtgcttcctactttatgg

SEQ ID NO: 62563 - RNA, 24 nt, Synthetic Construct
  source 1..24: mol_type = other RNA
tcggatccgtctgagcttggcttt

SEQ ID NO: 62564 - RNA, 23 nt, Synthetic Construct
  source 1..23: mol_type = other RNA
tgaggtagtaggttgtgtggtat

SEQ ID NO: 62565 - RNA, 23 nt, Synthetic Construct
  source 1..23: mol_type = other RNA
tgaggtagtaggttgtgtggtat

SEQ ID NO: 62566 - RNA, 22 nt, Synthetic Construct
  source 1..22: mol_type = other RNA
tgaggtagtggtttgtgctgtt

SEQ ID NO: 62567 - RNA, 22 nt, Synthetic Construct
  source 1..22: mol_type = other RNA
tattgcacttgtctcggcctgt

SEQ ID NO: 62568 - RNA, 22 nt, Synthetic Construct
  source 1..22: mol_type = other RNA
tattgcacttgtctcggcctgt

SEQ ID NO: 62569 - RNA, 23 nt, Synthetic Construct
  source 1..23: mol_type = other RNA
aatgacacgatcactcccgttga

SEQ ID NO: 62570 - RNA, 23 nt, Synthetic Construct
  source 1..23: mol_type = other RNA
tgtcagtttgtcaaataccccag

SEQ ID NO: 62571 - RNA, 23 nt, Synthetic Construct
  source 1..23: mol_type = other RNA
cagcggaatcccaaaagcagctg

SEQ ID NO: 62572 - RNA, 23 nt, Synthetic Construct
  source 1..23: mol_type = other RNA
cagcggaatcccaaaagcagctg

SEQ ID NO: 62573 - RNA, 21 nt, Synthetic Construct
  source 1..21: mol_type = other RNA
tagcaccatctgaaatcggta

SEQ ID NO: 62574 - RNA, 24 nt, Synthetic Construct
  source 1..24: mol_type = other RNA
taccacagggtagaaccacggatt

SEQ ID NO: 62575 - RNA, 24 nt, Synthetic Construct
  source 1..24: mol_type = other RNA
taccacagggtagaaccacggatt

SEQ ID NO: 62576 - RNA, 24 nt, Synthetic Construct
  source 1..24: mol_type = other RNA
tgaggtagtagattgtatagtttt

SEQ ID NO: 62577 - RNA, 24 nt, Synthetic Construct
  source 1..24: mol_type = other RNA
tgaggtagtagattgtatagtttt

SEQ ID NO: 62578 - RNA, 24 nt, Synthetic Construct
  source 1..24: mol_type = other RNA
tataccgaagctctaggtgcggca

SEQ ID NO: 62579 - RNA, 24 nt, Synthetic Construct
  source 1..24: mol_type = other RNA
tataccgaagctctaggtgcggca

SEQ ID NO: 62580 - RNA, 24 nt, Synthetic Construct
  source 1..24: mol_type = other RNA
tgagaactgaattccatgggtttt

SEQ ID NO: 62581 - RNA, 24 nt, Synthetic Construct
  source 1..24: mol_type = other RNA
tgagaactgaattccatgggtttt

SEQ ID NO: 62582 - RNA, 38 nt, Synthetic Construct; identical to SEQ ID NO: 1537
  source 1..38: mol_type = other RNA

SEQ ID NO: 62583 - RNA, 38 nt, Synthetic Construct; identical to SEQ ID NO: 1537
  source 1..38: mol_type = other RNA

SEQ ID NO: 62584 - RNA, 22 nt, Synthetic Construct
  source 1..22: mol_type = other RNA
tttgttcgttcggctcgcgtga

SEQ ID NO: 62585 - RNA, 23 nt, Synthetic Construct
  source 1..23: mol_type = other RNA
tgaggtagtaggttgtgtggttc

SEQ ID NO: 62586 - RNA, 23 nt, Synthetic Construct
  source 1..23: mol_type = other RNA
tgaggtagtaggttgtgtggttc

SEQ ID NO: 62587 - RNA, 23 nt, Synthetic Construct
  source 1..23: mol_type = other RNA
tggagtgtgacaatggtgtttgg

SEQ ID NO: 62588 - RNA, 22 nt, Synthetic Construct
  source 1..22: mol_type = other RNA
tcataccgtgagtaataatgcg

SEQ ID NO: 62589 - RNA, 21 nt, Synthetic Construct
  source 1..21: mol_type = other RNA
tgaggtagaaggttgtatagt

SEQ ID NO: 62590 - RNA, 21 nt, Synthetic Construct
  source 1..21: mol_type = other RNA
tgaggtagaaggttgtatagt

SEQ ID NO: 62591 - RNA, 18 nt, Synthetic Construct
  source 1..18: mol_type = other RNA
tgcagatcttggtggtag

SEQ ID NO: 62592 - RNA, 18 nt, Synthetic Construct
  source 1..18: mol_type = other RNA
tgcagatcttggtggtag

SEQ ID NO: 62593 - RNA, 36 nt, Synthetic Construct; identical to SEQ ID NO: 2344
  source 1..36: mol_type = other RNA

SEQ ID NO: 62594 - RNA, 22 nt, Synthetic Construct
  source 1..22: mol_type = other RNA
tgaggtagaaggttgtatagtt

SEQ ID NO: 62595 - RNA, 22 nt, Synthetic Construct
  source 1..22: mol_type = other RNA
tgaggtagaaggttgtatagtt

SEQ ID NO: 62596 - RNA, 23 nt, Synthetic Construct
  source 1..23: mol_type = other RNA
tgtcagtttgtcgaataccccaa

SEQ ID NO: 62597 - RNA, 23 nt, Synthetic Construct
  source 1..23: mol_type = other RNA
tgtcagtttgtcgaataccccaa

SEQ ID NO: 62598 - RNA, 23 nt, Synthetic Construct
  source 1..23: mol_type = other RNA
ggctcggtctgaggcccctcagt

SEQ ID NO: 62599 - RNA, 23 nt, Synthetic Construct
  source 1..23: mol_type = other RNA
ggctcggtctgaggcccctcagt

SEQ ID NO: 62600 - RNA, 24 nt, Synthetic Construct
  source 1..24: mol_type = other RNA
agctcggtctgaggcccctcagtt

SEQ ID NO: 62601 - RNA, 24 nt, Synthetic Construct
  source 1..24: mol_type = other RNA
agctcggtctgaggcccctcagtt

SEQ ID NO: 62602 - RNA, 22 nt, Synthetic Construct
  source 1..22: mol_type = other RNA
tagcagcacttaaatattggcg

SEQ ID NO: 62603 - RNA, 22 nt, Synthetic Construct
  source 1..22: mol_type = other RNA
tagcagcacttaaatattggcg

SEQ ID NO: 62604 - RNA, 17 nt, Synthetic Construct
  source 1..17: mol_type = other RNA
ccagtaaacggcggccg

SEQ ID NO: 62605 - RNA, 17 nt, Synthetic Construct
  source 1..17: mol_type = other RNA
ccagtaaacggcggccg

SEQ ID NO: 62606 - RNA, 21 nt, Synthetic Construct
  source 1..21: mol_type = other RNA
tgtcccacccccactcctgtt

SEQ ID NO: 62607 - RNA, 21 nt, Synthetic Construct
  source 1..21: mol_type = other RNA
tgtcccacccccactcctgtt

SEQ ID NO: 62608 - RNA, 24 nt, Synthetic Construct
  source 1..24: mol_type = other RNA
tgtaaacacccccgactggaagct

SEQ ID NO: 62609 - RNA, 24 nt, Synthetic Construct
  source 1..24: mol_type = other RNA
tgtaaacacccccgactggaagct

SEQ ID NO: 62610 - RNA, 24 nt, Synthetic Construct
  source 1..24: mol_type = other RNA
aatgacacgatcactcccgttgag

SEQ ID NO: 62611 - RNA, 24 nt, Synthetic Construct
  source 1..24: mol_type = other RNA
aatgacacgatcactcccgttgag

SEQ ID NO: 62612 - RNA, 21 nt, Synthetic Construct
  source 1..21: mol_type = other RNA
tgagaactgaattccatgggt

SEQ ID NO: 62613 - RNA, 23 nt, Synthetic Construct
  source 1..23: mol_type = other RNA
cgactcttagcggtggatcactc

SEQ ID NO: 62614 - RNA, 23 nt, Synthetic Construct
  source 1..23: mol_type = other RNA
attctaatttctccacgtctttg

SEQ ID NO: 62615 - RNA, 23 nt, Synthetic Construct
  source 1..23: mol_type = other RNA
attctaatttctccacgtctttg

SEQ ID NO: 62616 - RNA, 22 nt, Synthetic Construct
  source 1..22: mol_type = other RNA
tggggtagtaggttgtatagtt

SEQ ID NO: 62617 - RNA, 22 nt, Synthetic Construct
  source 1..22: mol_type = other RNA
tggggtagtaggttgtatagtt

SEQ ID NO: 62618 - RNA, 22 nt, Synthetic Construct
  source 1..22: mol_type = other RNA
tcaagagcaataacgaaaaatg

SEQ ID NO: 62619 - RNA, 21 nt, Synthetic Construct
  source 1..21: mol_type = other RNA
cgtaccgcgagtaataatgcg

SEQ ID NO: 62620 - RNA, 24 nt, Synthetic Construct
  source 1..24: mol_type = other RNA
tgtaaacatccctgactggaagct

SEQ ID NO: 62621 - RNA, 24 nt, Synthetic Construct
  source 1..24: mol_type = other RNA
tgtaaacatccctgactggaagct

SEQ ID NO: 62622 - RNA, 16 nt, Synthetic Construct
  source 1..16: mol_type = other RNA
gtctacggccacacca

SEQ ID NO: 62623 - RNA, 16 nt, Synthetic Construct
  source 1..16: mol_type = other RNA
gtctacggccacacca

SEQ ID NO: 62624 - RNA, 17 nt, Synthetic Construct
  source 1..17: mol_type = other RNA
tgccagcagccgcggta

SEQ ID NO: 62625 - RNA, 28 nt, Synthetic Construct
  source 1..28: mol_type = other RNA
cccccccactgctaaatttgactggcta

SEQ ID NO: 62626 - RNA, 22 nt, Synthetic Construct
  source 1..22: mol_type = other RNA
tactgcacttgtcccggcctgt

SEQ ID NO: 62627 - RNA, 22 nt, Synthetic Construct
  source 1..22: mol_type = other RNA
tactgcacttgtcccggcctgt

SEQ ID NO: 62628 - RNA, 22 nt, Synthetic Construct
  source 1..22: mol_type = other RNA
tcctgaactgagctgccccgag

SEQ ID NO: 62629 - RNA, 21 nt, Synthetic Construct
  source 1..21: mol_type = other RNA
tgtcttgcaggccgtcatgca

SEQ ID NO: 62630 - RNA, 21 nt, Synthetic Construct
  source 1..21: mol_type = other RNA
tgtcttgcaggccgtcatgca

SEQ ID NO: 62631 - RNA, 23 nt, Synthetic Construct
  source 1..23: mol_type = other RNA
tgaggtagtaggttgtgtagttt

SEQ ID NO: 62632 - RNA, 23 nt, Synthetic Construct
  source 1..23: mol_type = other RNA
tgaggtagtaggttgtgtagttt

SEQ ID NO: 62633 - RNA, 24 nt, Synthetic Construct
  source 1..24: mol_type = other RNA
tcctgtactgagctgccccgagat

SEQ ID NO: 62634 - RNA, 19 nt, Synthetic Construct
  source 1..19: mol_type = other RNA
catggccgttcttagttgg

SEQ ID NO: 62635 - RNA, 21 nt, Synthetic Construct
  source 1..21: mol_type = other RNA
tggagtgtgacaatggtgctt

SEQ ID NO: 62636 - RNA, 21 nt, Synthetic Construct
  source 1..21: mol_type = other RNA
tacagtactgtgataactgaa

SEQ ID NO: 62637 - RNA, 21 nt, Synthetic Construct
  source 1..21: mol_type = other RNA
tacagtactgtgataactgaa

SEQ ID NO: 62638 - RNA, 19 nt, Synthetic Construct
  source 1..19: mol_type = other RNA
tagcttatcagactgatgt

SEQ ID NO: 62639 - RNA, 24 nt, Synthetic Construct
  source 1..24: mol_type = other RNA
tgaggtagtaggttgtgtggtttt

SEQ ID NO: 62640 - RNA, 21 nt, Synthetic Construct
  source 1..21: mol_type = other RNA
tgaggggcggagagcgagact

SEQ ID NO: 62641 - RNA, 26 nt, Synthetic Construct
  source 1..26: mol_type = other RNA
tgtaaacatccccgactggaagcttt

SEQ ID NO: 62642 - RNA, 26 nt, Synthetic Construct
  source 1..26: mol_type = other RNA
tgtaaacatccccgactggaagcttt

SEQ ID NO: 62643 - RNA, 17 nt, Synthetic Construct
  source 1..17: mol_type = other RNA
cagaactggcgatgcgg

SEQ ID NO: 62644 - RNA, 20 nt, Synthetic Construct
  source 1..20: mol_type = other RNA
tgaggcagtaggttgtatag

SEQ ID NO: 62645 - RNA, 17 nt, Synthetic Construct
  source 1..17: mol_type = other RNA
cagtagctcgaggaaaa

SEQ ID NO: 62646 - RNA, 17 nt, Synthetic Construct
  source 1..17: mol_type = other RNA
cagtagctcgaggaaaa

SEQ ID NO: 62647 - RNA, 23 nt, Synthetic Construct
  source 1..23: mol_type = other RNA
tcttggagtaggtcattgggtga

SEQ ID NO: 62648 - RNA, 19 nt, Synthetic Construct
  source 1..19: mol_type = other RNA
tccctgttcgggcgccatt

SEQ ID NO: 62649 - RNA, 28 nt, Synthetic Construct
  source 1..28: mol_type = other RNA
ggtggctgtagctcagttggtagagtcc

SEQ ID NO: 62650 - RNA, 28 nt, Synthetic Construct
  source 1..28: mol_type = other RNA
ggtggctgtagctcagttggtagagtcc

SEQ ID NO: 62651 - RNA, 23 nt, Synthetic Construct
  source 1..23: mol_type = other RNA
aaaagctgggttgagagggcgtt

SEQ ID NO: 62652 - RNA, 23 nt, Synthetic Construct
  source 1..23: mol_type = other RNA
aaaagctgggttgagagggcgtt

SEQ ID NO: 62653 - RNA, 23 nt, Synthetic Construct
  source 1..23: mol_type = other RNA
tggagtgtgacaatggtgtttgg

SEQ ID NO: 62654 - RNA, 23 nt, Synthetic Construct
  source 1..23: mol_type = other RNA
tggagtgtgacaatggtgtttgg

SEQ ID NO: 62655 - RNA, 25 nt, Synthetic Construct
  source 1..25: mol_type = other RNA
ttgaggatatgagatagagacgaca

SEQ ID NO: 62656 - RNA, 25 nt, Synthetic Construct
  source 1..25: mol_type = other RNA
ttgaggatatgagatagagacgaca

SEQ ID NO: 62657 - RNA, 21 nt, Synthetic Construct
  source 1..21: mol_type = other RNA
ctttgttcgattccgttgagt

SEQ ID NO: 62658 - RNA, 21 nt, Synthetic Construct
  source 1..21: mol_type = other RNA
ctttgttcgattccgttgagt

SEQ ID NO: 62659 - RNA, 23 nt, Synthetic Construct
  source 1..23: mol_type = other RNA
tgagaactgaattccatgggttt

SEQ ID NO: 62660 - RNA, 20 nt, Synthetic Construct
  source 1..20: mol_type = other RNA
agcagcattgtacagggcta

SEQ ID NO: 62661 - RNA, 19 nt, Synthetic Construct
  source 1..19: mol_type = other RNA
aacagtcaggatgttggct

SEQ ID NO: 62662 - RNA, 22 nt, Synthetic Construct
  source 1..22: mol_type = other RNA
tagcagcacgtaaatgttggcg

SEQ ID NO: 62663 - RNA, 22 nt, Synthetic Construct
  source 1..22: mol_type = other RNA
tagcagcacgtaaatgttggcg

SEQ ID NO: 62664 - RNA, 22 nt, Synthetic Construct
  source 1..22: mol_type = other RNA
tgaggtagtaggttgaatagtt

SEQ ID NO: 62665 - RNA, 22 nt, Synthetic Construct
  source 1..22: mol_type = other RNA
tcctgtactgagctgccccggg

SEQ ID NO: 62666 - RNA, 36 nt, Synthetic Construct; identical to SEQ ID NO: 2478
  source 1..36: mol_type = other RNA

SEQ ID NO: 62667 - RNA, 23 nt, Synthetic Construct
  source 1..23: mol_type = other RNA
atgacacgatcactcccgttgag

SEQ ID NO: 62668 - RNA, 21 nt, Synthetic Construct
  source 1..21: mol_type = other RNA
tgaggtagcaggttgtgtggt

SEQ ID NO: 62669 - RNA, 24 nt, Synthetic Construct
  source 1..24: mol_type = other RNA
tgaggtagtaggttgtgtggttta

SEQ ID NO: 62670 - RNA, 28 nt, Synthetic Construct
  source 1..28: mol_type = other RNA
gcggtataccgaagctctaggtgcggca

SEQ ID NO: 62671 - RNA, 28 nt, Synthetic Construct
  source 1..28: mol_type = other RNA
gcggtataccgaagctctaggtgcggca

SEQ ID NO: 62672 - RNA, 22 nt, Synthetic Construct
  source 1..22: mol_type = other RNA
cattgcacttgtctcggtctgg

SEQ ID NO: 62673 - RNA, 22 nt, Synthetic Construct
  source 1..22: mol_type = other RNA
cattgcacttgtctcggtctgg

SEQ ID NO: 62674 - RNA, 23 nt, Synthetic Construct
  source 1..23: mol_type = other RNA
caaagtgctgttcgcgcaggtag

SEQ ID NO: 62675 - RNA, 23 nt, Synthetic Construct
  source 1..23: mol_type = other RNA
caaagtgctgttcgcgcaggtag

SEQ ID NO: 62676 - RNA, 23 nt, Synthetic Construct
  source 1..23: mol_type = other RNA
caacggaatcccaaaggcagctg

SEQ ID NO: 62677 - RNA, 23 nt, Synthetic Construct
  source 1..23: mol_type = other RNA
caacggaatcccaaaggcagctg

SEQ ID NO: 62678 - RNA, 35 nt, Synthetic Construct; identical to SEQ ID NO: 34978
  source 1..35: mol_type = other RNA

SEQ ID NO: 62679 - RNA, 21 nt, Synthetic Construct
  source 1..21: mol_type = other RNA
cgaggtagtagattgtatagt

SEQ ID NO: 62680 - RNA, 23 nt, Synthetic Construct
  source 1..23: mol_type = other RNA
cgcagcattgtacagggctatga

SEQ ID NO: 62681 - RNA, 21 nt, Synthetic Construct
  source 1..21: mol_type = other RNA
tgaggaagtagattgtatagt

SEQ ID NO: 62682 - RNA, 21 nt, Synthetic Construct
  source 1..21: mol_type = other RNA
tgaggaagtagattgtatagt

SEQ ID NO: 62683 - RNA, 15 nt, Synthetic Construct
  source 1..15: mol_type = other RNA
accggaggaaggtgg

SEQ ID NO: 62684 - RNA, 15 nt, Synthetic Construct
  source 1..15: mol_type = other RNA
accggaggaaggtgg

SEQ ID NO: 62685 - RNA, 17 nt, Synthetic Construct
  source 1..17: mol_type = other RNA
ccgtgtgaaagtaggtc

SEQ ID NO: 62686 - RNA, 17 nt, Synthetic Construct
  source 1..17: mol_type = other RNA
ccgtgtgaaagtaggtc

SEQ ID NO: 62687 - RNA, 22 nt, Synthetic Construct
  source 1..22: mol_type = other RNA
tagctgcacgtaaatattggcg

SEQ ID NO: 62688 - RNA, 22 nt, Synthetic Construct
  source 1..22: mol_type = other RNA
tgaggtagtagtctgtgctgtt

SEQ ID NO: 62689 - RNA, 18 nt, Synthetic Construct
  source 1..18: mol_type = other RNA
cataaagtagaaagcact

SEQ ID NO: 62690 - RNA, 23 nt, Synthetic Construct
  source 1..23: mol_type = other RNA
tcagtgcatgacagaacttgggt

SEQ ID NO: 62691 - RNA, 22 nt, Synthetic Construct
  source 1..22: mol_type = other RNA
ttgcagcacgtaaatattggcg

SEQ ID NO: 62692 - RNA, 15 nt, Synthetic Construct
  source 1..15: mol_type = other RNA
ggagagatggctgag

SEQ ID NO: 62693 - RNA, 23 nt, Synthetic Construct
  source 1..23: mol_type = other RNA
caaagagctgttcgtgcaggtag

SEQ ID NO: 62694 - RNA, 23 nt, Synthetic Construct
  source 1..23: mol_type = other RNA
caaagagctgttcgtgcaggtag

SEQ ID NO: 62695 - RNA, 21 nt, Synthetic Construct
  source 1..21: mol_type = other RNA
tgaggtagtaggttgtatagt

SEQ ID NO: 62696 - RNA, 23 nt, Synthetic Construct
  source 1..23: mol_type = other RNA
tcctgtactgagctgcctcgaga

SEQ ID NO: 62697 - RNA, 23 nt, Synthetic Construct
  source 1..23: mol_type = other RNA
tcctgtactgagctgcctcgaga

SEQ ID NO: 62698 - RNA, 22 nt, Synthetic Construct
  source 1..22: mol_type = other RNA
tgaggtagtagattgcatagtt

SEQ ID NO: 62699 - RNA, 23 nt, Synthetic Construct
  source 1..23: mol_type = other RNA
cctccctcgggagggcgcgcggg

SEQ ID NO: 62700 - RNA, 23 nt, Synthetic Construct
  source 1..23: mol_type = other RNA
cctccctcgggagggcgcgcggg

SEQ ID NO: 62701 - RNA, 22 nt, Synthetic Construct
  source 1..22: mol_type = other RNA
tgaggtagtagtttgtgctgct

SEQ ID NO: 62702 - RNA, 22 nt, Synthetic Construct
  source 1..22: mol_type = other RNA
tcataccgtgagtaataatgcg

SEQ ID NO: 62703 - RNA, 23 nt, Synthetic Construct
  source 1..23: mol_type = other RNA
tgaggtagtaggttgtgtggtat

SEQ ID NO: 62704 - RNA, 23 nt, Synthetic Construct
  source 1..23: mol_type = other RNA
tgaggtagtaggttgtgtggtat

SEQ ID NO: 62705 - RNA, 21 nt, Synthetic Construct
  source 1..21: mol_type = other RNA
ggaggtagtagtttgtgctgt

SEQ ID NO: 62706 - RNA, 21 nt, Synthetic Construct
  source 1..21: mol_type = other RNA
ggaggtagtagtttgtgctgt

SEQ ID NO: 62707 - RNA, 15 nt, Synthetic Construct
  source 1..15: mol_type = other RNA
cgatatggcatgaga

SEQ ID NO: 62708 - RNA, 23 nt, Synthetic Construct
  source 1..23: mol_type = other RNA
tgaggtagtaggttgtgtggtct

SEQ ID NO: 62709 - RNA, 19 nt, Synthetic Construct
  source 1..19: mol_type = other RNA
tccccggcatctccaccaa

SEQ ID NO: 62710 - RNA, 19 nt, Synthetic Construct
  source 1..19: mol_type = other RNA
tccccggcatctccaccaa

SEQ ID NO: 62711 - RNA, 19 nt, Synthetic Construct
  source 1..19: mol_type = other RNA
tgaggtagtaggttgtgtg

SEQ ID NO: 62712 - RNA, 19 nt, Synthetic Construct
  source 1..19: mol_type = other RNA
tgaggtagtaggttgtgtg

SEQ ID NO: 62713 - RNA, 22 nt, Synthetic Construct
  source 1..22: mol_type = other RNA
tgaggtagtaggttgtgtggtt

SEQ ID NO: 62714 - RNA, 20 nt, Synthetic Construct
  source 1..20: mol_type = other RNA
tgaggcagtaggttgtatag

SEQ ID NO: 62715 - RNA, 23 nt, Synthetic Construct
  source 1..23: mol_type = other RNA
tggaatgtaaagaagtatgtacc

SEQ ID NO: 62716 - RNA, 23 nt, Synthetic Construct
  source 1..23: mol_type = other RNA
tggaatgtaaagaagtatgtacc

SEQ ID NO: 62717 - RNA, 21 nt, Synthetic Construct
  source 1..21: mol_type = other RNA
tgaggggcagagagcgggact

SEQ ID NO: 62718 - RNA, 21 nt, Synthetic Construct
  source 1..21: mol_type = other RNA
tgaggggcagagagcgggact

SEQ ID NO: 62719 - RNA, 22 nt, Synthetic Construct
  source 1..22: mol_type = other RNA
tggagtgtggcaatggtgtttg

SEQ ID NO: 62720 - RNA, 22 nt, Synthetic Construct
  source 1..22: mol_type = other RNA
tggagtgtggcaatggtgtttg

SEQ ID NO: 62721 - RNA, 17 nt, Synthetic Construct
  source 1..17: mol_type = other RNA
gggaacgtgagctgggt

SEQ ID NO: 62722 - RNA, 17 nt, Synthetic Construct
  source 1..17: mol_type = other RNA
gggaacgtgagctgggt

SEQ ID NO: 62723 - RNA, 18 nt, Synthetic Construct
  source 1..18: mol_type = other RNA
cttggggttgtaggacca

SEQ ID NO: 62724 - RNA, 18 nt, Synthetic Construct
  source 1..18: mol_type = other RNA
cttggggttgtaggacca

SEQ ID NO: 62725 - RNA, 23 nt, Synthetic Construct
  source 1..23: mol_type = other RNA
cagcggaatcccaaaagcagctg

SEQ ID NO: 62726 - RNA, 23 nt, Synthetic Construct
  source 1..23: mol_type = other RNA
cagcggaatcccaaaagcagctg

SEQ ID NO: 62727 - RNA, 22 nt, Synthetic Construct
  source 1..22: mol_type = other RNA
tgaggtagtagattgtatagta

SEQ ID NO: 62728 - RNA, 22 nt, Synthetic Construct
  source 1..22: mol_type = other RNA
tgaggtagtagattgtatagta

SEQ ID NO: 62729 - RNA, 22 nt, Synthetic Construct
  source 1..22: mol_type = other RNA
tccagtactgagctgccccgag

SEQ ID NO: 62730 - RNA, 22 nt, Synthetic Construct
  source 1..22: mol_type = other RNA
tccagtactgagctgccccgag

SEQ ID NO: 62731 - RNA, 22 nt, Synthetic Construct
  source 1..22: mol_type = other RNA
tcctgtactgagctgccccgtg

SEQ ID NO: 62732 - RNA, 23 nt, Synthetic Construct
  source 1..23: mol_type = other RNA
tccagtactgagctgccccgagt

SEQ ID NO: 62733 - RNA, 34 nt, Synthetic Construct; identical to SEQ ID NO: 385
  source 1..34: mol_type = other RNA

SEQ ID NO: 62734 - RNA, 34 nt, Synthetic Construct; identical to SEQ ID NO: 385
  source 1..34: mol_type = other RNA

SEQ ID NO: 62735 - RNA, 22 nt, Synthetic Construct
  source 1..22: mol_type = other RNA
cattgcacctgtctcggtctga

SEQ ID NO: 62736 - RNA, 22 nt, Synthetic Construct
  source 1..22: mol_type = other RNA
cattgcacctgtctcggtctga

SEQ ID NO: 62737 - RNA, 22 nt, Synthetic Construct
  source 1..22: mol_type = other RNA
tgaggtagtagtctgtgctgtt

SEQ ID NO: 62738 - RNA, 21 nt, Synthetic Construct
  source 1..21: mol_type = other RNA
atcaagtaattcaggataggt

SEQ ID NO: 62739 - RNA, 36 nt, Synthetic Construct; identical to SEQ ID NO: 777
  source 1..36: mol_type = other RNA

SEQ ID NO: 62740 - RNA, 25 nt, Synthetic Construct
  source 1..25: mol_type = other RNA
gagaaagctcacaagaactgctaac

SEQ ID NO: 62741 - RNA, 25 nt, Synthetic Construct
  source 1..25: mol_type = other RNA
gagaaagctcacaagaactgctaac

SEQ ID NO: 62742 - RNA, 23 nt, Synthetic Construct
  source 1..23: mol_type = other RNA
tcctgtgctgagctgccccgagt

SEQ ID NO: 62743 - RNA, 23 nt, Synthetic Construct
  source 1..23: mol_type = other RNA
caaagtgctgttcgagcaggtag

SEQ ID NO: 62744 - RNA, 23 nt, Synthetic Construct
  source 1..23: mol_type = other RNA
caaagtgctgttcgagcaggtag

SEQ ID NO: 62745 - RNA, 35 nt, Synthetic Construct; identical to SEQ ID NO: 9871
  source 1..35: mol_type = other RNA

SEQ ID NO: 62746 - RNA, 35 nt, Synthetic Construct; identical to SEQ ID NO: 9871
  source 1..35: mol_type = other RNA

SEQ ID NO: 62747 - RNA, 23 nt, Synthetic Construct
  source 1..23: mol_type = other RNA
caaagtgctattcgtgcaggtag

SEQ ID NO: 62748 - RNA, 18 nt, Synthetic Construct
  source 1..18: mol_type = other RNA
tcttcggtagtatagtgg

SEQ ID NO: 62749 - RNA, 22 nt, Synthetic Construct
  source 1..22: mol_type = other RNA
tattgcacttgtcccgacctgt

SEQ ID NO: 62750 - RNA, 19 nt, Synthetic Construct
  source 1..19: mol_type = other RNA
tacagtactgtgataactg

SEQ ID NO: 62751 - RNA, 27 nt, Synthetic Construct
  source 1..27: mol_type = other RNA
ccccccactgctaaatctgactggctt

SEQ ID NO: 62752 - RNA, 27 nt, Synthetic Construct
  source 1..27: mol_type = other RNA
ccccccactgctaaatctgactggctt

SEQ ID NO: 62753 - RNA, 22 nt, Synthetic Construct
  source 1..22: mol_type = other RNA
ctagactgaagctccttgaggt

SEQ ID NO: 62754 - RNA, 24 nt, Synthetic Construct
  source 1..24: mol_type = other RNA
tgtaaacatccccgaccggaagct

SEQ ID NO: 62755 - RNA, 31 nt, Synthetic Construct; identical to SEQ ID NO: 7160
  source 1..31: mol_type = other RNA

SEQ ID NO: 62756 - RNA, 31 nt, Synthetic Construct; identical to SEQ ID NO: 7160
  source 1..31: mol_type = other RNA

SEQ ID NO: 62757 - RNA, 34 nt, Synthetic Construct; identical to SEQ ID NO: 10079
  source 1..34: mol_type = other RNA

SEQ ID NO: 62758 - RNA, 34 nt, Synthetic Construct; identical to SEQ ID NO: 10079
  source 1..34: mol_type = other RNA

SEQ ID NO: 62759 - RNA, 22 nt, Synthetic Construct
  source 1..22: mol_type = other RNA
tagcagcacgtaaatattagcg

SEQ ID NO: 62760 - RNA, 23 nt, Synthetic Construct
  source 1..23: mol_type = other RNA
ttatggtttgcctgggactgagt

SEQ ID NO: 62761 - RNA, 21 nt, Synthetic Construct
  source 1..21: mol_type = other RNA
tccagtactgagctgccccga

SEQ ID NO: 62762 - RNA, 23 nt, Synthetic Construct
  source 1..23: mol_type = other RNA
tgggctaagggagatgattgggt

SEQ ID NO: 62763 - RNA, 22 nt, Synthetic Construct
  source 1..22: mol_type = other RNA
aaactccttaagcgaatctcgc

SEQ ID NO: 62764 - RNA, 22 nt, Synthetic Construct
  source 1..22: mol_type = other RNA
aaactccttaagcgaatctcgc

SEQ ID NO: 62765 - RNA, 23 nt, Synthetic Construct
  source 1..23: mol_type = other RNA
ggaggtagtaggttgtgtggttt

SEQ ID NO: 62766 - RNA, 23 nt, Synthetic Construct
  source 1..23: mol_type = other RNA
ggaggtagtaggttgtgtggttt

SEQ ID NO: 62767 - RNA, 23 nt, Synthetic Construct
  source 1..23: mol_type = other RNA
cgacggaatcccaaaagcagctg

SEQ ID NO: 62768 - RNA, 23 nt, Synthetic Construct
  source 1..23: mol_type = other RNA
cgacggaatcccaaaagcagctg

SEQ ID NO: 62769 - RNA, 23 nt, Synthetic Construct
  source 1..23: mol_type = other RNA
tgaggtagtaggttgtgtggtta

SEQ ID NO: 62770 - RNA, 22 nt, Synthetic Construct
  source 1..22: mol_type = other RNA
cgaggtagtaggttgtatagtt

SEQ ID NO: 62771 - RNA, 22 nt, Synthetic Construct
  source 1..22: mol_type = other RNA
cgaggtagtaggttgtatagtt

SEQ ID NO: 62772 - RNA, 27 nt, Synthetic Construct
  source 1..27: mol_type = other RNA
ccccccactgctaaatatgactggctt

SEQ ID NO: 62773 - RNA, 16 nt, Synthetic Construct
  source 1..16: mol_type = other RNA
gtgaaatgtttaggac

SEQ ID NO: 62774 - RNA, 16 nt, Synthetic Construct
  source 1..16: mol_type = other RNA
gtgaaatgtttaggac

SEQ ID NO: 62775 - RNA, 22 nt, Synthetic Construct
  source 1..22: mol_type = other RNA
ggaggtagtagtttgtgctgtt

SEQ ID NO: 62776 - RNA, 22 nt, Synthetic Construct
  source 1..22: mol_type = other RNA
ggaggtagtagtttgtgctgtt

SEQ ID NO: 62777 - RNA, 21 nt, Synthetic Construct
  source 1..21: mol_type = other RNA
tcctatactgagctgccccga

SEQ ID NO: 62778 - RNA, 21 nt, Synthetic Construct
  source 1..21: mol_type = other RNA
tcctatactgagctgccccga

SEQ ID NO: 62779 - RNA, 23 nt, Synthetic Construct
  source 1..23: mol_type = other RNA
tgtgcaaatccatgcaaaactga

SEQ ID NO: 62780 - RNA, 23 nt, Synthetic Construct
  source 1..23: mol_type = other RNA
tgtgcaaatccatgcaaaactga

SEQ ID NO: 62781 - RNA, 23 nt, Synthetic Construct
  source 1..23: mol_type = other RNA
atgacacgatcactcccgttgag

SEQ ID NO: 62782 - RNA, 23 nt, Synthetic Construct
  source 1..23: mol_type = other RNA
atgacacgatcactcccgttgag

SEQ ID NO: 62783 - RNA, 22 nt, Synthetic Construct
  source 1..22: mol_type = other RNA
tagcagcacataaatattggcg

SEQ ID NO: 62784 - RNA, 24 nt, Synthetic Construct
  source 1..24: mol_type = other RNA
caacggaatcccaaaagcagctgt

SEQ ID NO: 62785 - RNA, 24 nt, Synthetic Construct
  source 1..24: mol_type = other RNA
caacggaatcccaaaagcagctgt

SEQ ID NO: 62786 - RNA, 21 nt, Synthetic Construct
  source 1..21: mol_type = other RNA
tgaggtagcaggttgtatagt

SEQ ID NO: 62787 - RNA, 21 nt, Synthetic Construct
  source 1..21: mol_type = other RNA
tgaggtagcaggttgtatagt

SEQ ID NO: 62788 - RNA, 21 nt, Synthetic Construct
  source 1..21: mol_type = other RNA
acagtagcctgcacattggtt

SEQ ID NO: 62789 - RNA, 21 nt, Synthetic Construct
  source 1..21: mol_type = other RNA
taccctgtagatccgaatttg

SEQ ID NO: 62790 - RNA, 21 nt, Synthetic Construct
  source 1..21: mol_type = other RNA
taccctgtagatccgaatttg

SEQ ID NO: 62791 - RNA, 15 nt, Synthetic Construct
  source 1..15: mol_type = other RNA
cgactcttagcggtg

SEQ ID NO: 62792 - RNA, 15 nt, Synthetic Construct
  source 1..15: mol_type = other RNA
cgactcttagcggtg

SEQ ID NO: 62793 - RNA, 22 nt, Synthetic Construct
  source 1..22: mol_type = other RNA
tgaggtggtagattgtatagtt

SEQ ID NO: 62794 - RNA, 20 nt, Synthetic Construct
  source 1..20: mol_type = other RNA
tgaggtagtaggttgtgcgg

SEQ ID NO: 62795 - RNA, 22 nt, Synthetic Construct
  source 1..22: mol_type = other RNA
agtagtgtttcctactttatgg

SEQ ID NO: 62796 - RNA, 24 nt, Synthetic Construct
  source 1..24: mol_type = other RNA
tatatcggaacgtgcccagtcgtg

SEQ ID NO: 62797 - RNA, 24 nt, Synthetic Construct
  source 1..24: mol_type = other RNA
tatatcggaacgtgcccagtcgtg

SEQ ID NO: 62798 - RNA, 32 nt, Synthetic Construct; identical to SEQ ID NO: 37450
  source 1..32: mol_type = other RNA

SEQ ID NO: 62799 - RNA, 32 nt, Synthetic Construct; identical to SEQ ID NO: 37450
  source 1..32: mol_type = other RNA

SEQ ID NO: 62800 - RNA, 21 nt, Synthetic Construct
  source 1..21: mol_type = other RNA
tcttggagtaggtcattgggt

SEQ ID NO: 62801 - RNA, 22 nt, Synthetic Construct
  source 1..22: mol_type = other RNA
tgaggtagtaggttatatagtt

SEQ ID NO: 62802 - RNA, 22 nt, Synthetic Construct
  source 1..22: mol_type = other RNA
tgaggtagtaggttatatagtt

SEQ ID NO: 62803 - RNA, 23 nt, Synthetic Construct
  source 1..23: mol_type = other RNA
tggagacgcggccctgttggagt

SEQ ID NO: 62804 - RNA, 16 nt, Synthetic Construct
  source 1..16: mol_type = other RNA
gtctacagccatacca

SEQ ID NO: 62805 - RNA, 21 nt, Synthetic Construct
  source 1..21: mol_type = other RNA
ctaggctgaagctccttgagg

SEQ ID NO: 62806 - RNA, 21 nt, Synthetic Construct
  source 1..21: mol_type = other RNA
ctaggctgaagctccttgagg

SEQ ID NO: 62807 - RNA, 23 nt, Synthetic Construct
  source 1..23: mol_type = other RNA
tggcagtgtcttagctggttgtt

SEQ ID NO: 62808 - RNA, 26 nt, Synthetic Construct
  source 1..26: mol_type = other RNA
gaggaacactagtggcgtaggcgaga

SEQ ID NO: 62809 - RNA, 22 nt, Synthetic Construct
  source 1..22: mol_type = other RNA
cattgcacttgcctcggtctga

SEQ ID NO: 62810 - RNA, 22 nt, Synthetic Construct
  source 1..22: mol_type = other RNA
cattgcacttgcctcggtctga

SEQ ID NO: 62811 - RNA, 17 nt, Synthetic Construct
  source 1..17: mol_type = other RNA
taggtcatcgtcaggct

SEQ ID NO: 62812 - RNA, 22 nt, Synthetic Construct
  source 1..22: mol_type = other RNA
tcgtaccgcgagtaataatgcg

SEQ ID NO: 62813 - RNA, 22 nt, Synthetic Construct
  source 1..22: mol_type = other RNA
tagcagtacgtaaatattggcg

SEQ ID NO: 62814 - RNA, 22 nt, Synthetic Construct
  source 1..22: mol_type = other RNA
tagcagtacgtaaatattggcg

SEQ ID NO: 62815 - RNA, 21 nt, Synthetic Construct
  source 1..21: mol_type = other RNA
tcctgtactgagctgcctcga

SEQ ID NO: 62816 - RNA, 21 nt, Synthetic Construct
  source 1..21: mol_type = other RNA
tcctgtactgagctgcctcga

SEQ ID NO: 62817 - RNA, 21 nt, Synthetic Construct
  source 1..21: mol_type = other RNA
tcctgtactgagctgcctcga

SEQ ID NO: 62818 - RNA, 23 nt, Synthetic Construct
  source 1..23: mol_type = other RNA
tcctgtactgagctgctccgaga

SEQ ID NO: 62819 - RNA, 23 nt, Synthetic Construct
  source 1..23: mol_type = other RNA
tcctgtactgagctgctccgaga

SEQ ID NO: 62820 - RNA, 21 nt, Synthetic Construct
  source 1..21: mol_type = other RNA
tgaggtagtagattgtataga

SEQ ID NO: 62821 - RNA, 21 nt, Synthetic Construct
  source 1..21: mol_type = other RNA
tgaggtagtagattgtataga

SEQ ID NO: 62822 - RNA, 22 nt, Synthetic Construct
  source 1..22: mol_type = other RNA
tgacgtagtagtttgtgctgtt

SEQ ID NO: 62823 - RNA, 22 nt, Synthetic Construct
  source 1..22: mol_type = other RNA
tcgtaccgtaagtaataatgcg

SEQ ID NO: 62824 - RNA, 24 nt, Synthetic Construct
  source 1..24: mol_type = other RNA
tgtaaacatccccgactggaggct

SEQ ID NO: 62825 - RNA, 22 nt, Synthetic Construct
  source 1..22: mol_type = other RNA
catagcacttgtctcggtctga

SEQ ID NO: 62826 - RNA, 16 nt, Synthetic Construct
  source 1..16: mol_type = other RNA
gtctatggccatacca

SEQ ID NO: 62827 - RNA, 27 nt, Synthetic Construct
  source 1..27: mol_type = other RNA
ccccccactactaaatttgactggctt

SEQ ID NO: 62828 - RNA, 27 nt, Synthetic Construct
  source 1..27: mol_type = other RNA
ccccccactactaaatttgactggctt

SEQ ID NO: 62829 - RNA, 23 nt, Synthetic Construct
  source 1..23: mol_type = other RNA
cagagttctacagtccgacgatc

SEQ ID NO: 62830 - RNA, 23 nt, Synthetic Construct
  source 1..23: mol_type = other RNA
cagagttctacagtccgacgatc

SEQ ID NO: 62831 - RNA, 19 nt, Synthetic Construct
  source 1..19: mol_type = other RNA
cttggggttgtaggaccac

SEQ ID NO: 62832 - RNA, 19 nt, Synthetic Construct
  source 1..19: mol_type = other RNA
gtccggatcgtagtctgca

SEQ ID NO: 62833 - RNA, 19 nt, Synthetic Construct
  source 1..19: mol_type = other RNA
gtccggatcgtagtctgca

SEQ ID NO: 62834 - RNA, 20 nt, Synthetic Construct
  source 1..20: mol_type = other RNA
tgaggtagtaggtcgtatag

SEQ ID NO: 62835 - RNA, 16 nt, Synthetic Construct
  source 1..16: mol_type = other RNA
gtctacgaccatacca

SEQ ID NO: 62836 - RNA, 17 nt, Synthetic Construct
  source 1..17: mol_type = other RNA
catgcaagtcgaacggt

SEQ ID NO: 62837 - RNA, 20 nt, Synthetic Construct
  source 1..20: mol_type = other RNA
tgaggtagtaggttgtgtga

SEQ ID NO: 62838 - RNA, 27 nt, Synthetic Construct
  source 1..27: mol_type = other RNA
ncccccactgctaaatttgactggctt

SEQ ID NO: 62839 - RNA, 24 nt, Synthetic Construct
  source 1..24: mol_type = other RNA
tgggtaatacgacgtacttagtgt

SEQ ID NO: 62840 - RNA, 24 nt, Synthetic Construct
  source 1..24: mol_type = other RNA
tgggtaatacgacgtacttagtgt

SEQ ID NO: 62841 - RNA, 26 nt, Synthetic Construct
  source 1..26: mol_type = other RNA
tcctgtactgagctgccccgagtttt

SEQ ID NO: 62842 - RNA, 33 nt, Synthetic Construct; identical to SEQ ID NO: 7469
  source 1..33: mol_type = other RNA

SEQ ID NO: 62843 - RNA, 21 nt, Synthetic Construct
  source 1..21: mol_type = other RNA
tactccttaagcgaatctcgc

SEQ ID NO: 62844 - RNA, 21 nt, Synthetic Construct
  source 1..21: mol_type = other RNA
tactccttaagcgaatctcgc

SEQ ID NO: 62845 - RNA, 16 nt, Synthetic Construct
  source 1..16: mol_type = other RNA
ttggcctcaagtcagg

SEQ ID NO: 62846 - RNA, 30 nt, Synthetic Construct; identical to SEQ ID NO: 19738
  source 1..30: mol_type = other RNA

SEQ ID NO: 62847 - RNA, 30 nt, Synthetic Construct; identical to SEQ ID NO: 19738
  source 1..30: mol_type = other RNA

SEQ ID NO: 62848 - RNA, 20 nt, Synthetic Construct
  source 1..20: mol_type = other RNA
tgaggtagcaggttgtgtgg

SEQ ID NO: 62849 - RNA, 19 nt, Synthetic Construct
  source 1..19: mol_type = other RNA
ggctggtccgaaggtagtg

SEQ ID NO: 62850 - RNA, 19 nt, Synthetic Construct
  source 1..19: mol_type = other RNA
ggctggtccgaaggtagtg

SEQ ID NO: 62851 - RNA, 27 nt, Synthetic Construct
  source 1..27: mol_type = other RNA
ccccccactgccaaatttgactggctt

SEQ ID NO: 62852 - RNA, 15 nt, Synthetic Construct
  source 1..15: mol_type = other RNA
agttgaccgcctggg

SEQ ID NO: 62853 - RNA, 15 nt, Synthetic Construct
  source 1..15: mol_type = other RNA
agttgaccgcctggg

SEQ ID NO: 62854 - RNA, 18 nt, Synthetic Construct
  source 1..18: mol_type = other RNA
aaccgggcggaaacacca

SEQ ID NO: 62855 - RNA, 18 nt, Synthetic Construct
  source 1..18: mol_type = other RNA
aaccgggcggaaacacca

SEQ ID NO: 62856 - RNA, 22 nt, Synthetic Construct
  source 1..22: mol_type = other RNA
taggtagtttcctgttgttggg

SEQ ID NO: 62857 - RNA, 19 nt, Synthetic Construct
  source 1..19: mol_type = other RNA
tacagtatagatgatgtac

SEQ ID NO: 62858 - RNA, 19 nt, Synthetic Construct
  source 1..19: mol_type = other RNA
tcagtagctcgaggaaaag

SEQ ID NO: 62859 - RNA, 23 nt, Synthetic Construct
  source 1..23: mol_type = other RNA
acagtagtctgcacattggttaa

SEQ ID NO: 62860 - RNA, 23 nt, Synthetic Construct
  source 1..23: mol_type = other RNA
acagtagtctgcacattggttaa

SEQ ID NO: 62861 - RNA, 22 nt, Synthetic Construct
  source 1..22: mol_type = other RNA
tgagaactgagttccatgggtt

SEQ ID NO: 62862 - RNA, 22 nt, Synthetic Construct
  source 1..22: mol_type = other RNA
tgagaactgagttccatgggtt

SEQ ID NO: 62863 - RNA, 18 nt, Synthetic Construct
  source 1..18: mol_type = other RNA
tcagtagctcgaggaaaa

SEQ ID NO: 62864 - RNA, 21 nt, Synthetic Construct
  source 1..21: mol_type = other RNA
tggagtgtgacagtggtgttt

SEQ ID NO: 62865 - RNA, 21 nt, Synthetic Construct
  source 1..21: mol_type = other RNA
tggagtgtgacagtggtgttt

SEQ ID NO: 62866 - RNA, 22 nt, Synthetic Construct
  source 1..22: mol_type = other RNA
agtaaacatccccgactggaag

SEQ ID NO: 62867 - RNA, 24 nt, Synthetic Construct
  source 1..24: mol_type = other RNA
agcaacattgtctgctgggtttct

SEQ ID NO: 62868 - RNA, 24 nt, Synthetic Construct
  source 1..24: mol_type = other RNA
agcaacattgtctgctgggtttct

SEQ ID NO: 62869 - RNA, 25 nt, Synthetic Construct
  source 1..25: mol_type = other RNA
cgtgtatttgacaagctgagttgga

SEQ ID NO: 62870 - RNA, 22 nt, Synthetic Construct
  source 1..22: mol_type = other RNA
tcctgtactgagctgccccggg

SEQ ID NO: 62871 - RNA, 22 nt, Synthetic Construct
  source 1..22: mol_type = other RNA
tagcagcacgtaaatataggcg

SEQ ID NO: 62872 - RNA, 22 nt, Synthetic Construct
  source 1..22: mol_type = other RNA
tgagaactgaattccatgggta

SEQ ID NO: 62873 - RNA, 21 nt, Synthetic Construct
  source 1..21: mol_type = other RNA
tcctgtactgagctgcaccga

SEQ ID NO: 62874 - RNA, 21 nt, Synthetic Construct
  source 1..21: mol_type = other RNA
tcctgtactgagctgcaccga

SEQ ID NO: 62875 - RNA, 22 nt, Synthetic Construct
  source 1..22: mol_type = other RNA
acctgtactgagctgccccgag

SEQ ID NO: 62876 - RNA, 22 nt, Synthetic Construct
  source 1..22: mol_type = other RNA
acctgtactgagctgccccgag

SEQ ID NO: 62877 - RNA, 21 nt, Synthetic Construct
  source 1..21: mol_type = other RNA
tggagagaaaggcagttcctg

SEQ ID NO: 62878 - RNA, 21 nt, Synthetic Construct
  source 1..21: mol_type = other RNA
tggagagaaaggcagttcctg

SEQ ID NO: 62879 - RNA, 21 nt, Synthetic Construct
  source 1..21: mol_type = other RNA
ctagaccgaagctccttgagg

SEQ ID NO: 62880 - RNA, 16 nt, Synthetic Construct
  source 1..16: mol_type = other RNA
tcgtgacgatagtgca

SEQ ID NO: 62881 - RNA, 22 nt, Synthetic Construct
  source 1..22: mol_type = other RNA
tcctgaactgagctgccccgag

SEQ ID NO: 62882 - RNA, 22 nt, Synthetic Construct
  source 1..22: mol_type = other RNA
tgaggtagtaggttgaatagtt

SEQ ID NO: 62883 - RNA, 22 nt, Synthetic Construct
  source 1..22: mol_type = other RNA
tcctgtactgagctgccccgtg

SEQ ID NO: 62884 - RNA, 22 nt, Synthetic Construct
  source 1..22: mol_type = other RNA
tgaggtagtagattgtatggtt

SEQ ID NO: 62885 - RNA, 19 nt, Synthetic Construct
  source 1..19: mol_type = other RNA
tgtcagtttgtcaaatacc

SEQ ID NO: 62886 - RNA, 21 nt, Synthetic Construct
  source 1..21: mol_type = other RNA
tgaggtagtaggttgtgaggt

SEQ ID NO: 62887 - RNA, 22 nt, Synthetic Construct
  source 1..22: mol_type = other RNA
gcactctaatgagactgccggt

SEQ ID NO: 62888 - RNA, 22 nt, Synthetic Construct
  source 1..22: mol_type = other RNA
tgagaactgaattccacgggtt

SEQ ID NO: 62889 - RNA, 22 nt, Synthetic Construct
  source 1..22: mol_type = other RNA
tgagaactgaattccacgggtt

SEQ ID NO: 62890 - RNA, 27 nt, Synthetic Construct
  source 1..27: mol_type = other RNA
ccccccactgttaaatttgactggctt

SEQ ID NO: 62891 - RNA, 16 nt, Synthetic Construct
  source 1..16: mol_type = other RNA
cccagaaacccggtcg

SEQ ID NO: 62892 - RNA, 20 nt, Synthetic Construct
  source 1..20: mol_type = other RNA
tgaggtggtaggttgtatag

SEQ ID NO: 62893 - RNA, 21 nt, Synthetic Construct
  source 1..21: mol_type = other RNA
agctcggtctgaggcccctca

SEQ ID NO: 62894 - RNA, 20 nt, Synthetic Construct
  source 1..20: mol_type = other RNA
caaagtgctgttcgtgcagg

SEQ ID NO: 62895 - RNA, 20 nt, Synthetic Construct
  source 1..20: mol_type = other RNA
caaagtgctgttcgtgcagg

SEQ ID NO: 62896 - RNA, 31 nt, Synthetic Construct; identical to SEQ ID NO: 2295
  source 1..31: mol_type = other RNA

SEQ ID NO: 62897 - RNA, 22 nt, Synthetic Construct
  source 1..22: mol_type = other RNA
gcagtagtctgcacattggtta

SEQ ID NO: 62898 - RNA, 22 nt, Synthetic Construct
  source 1..22: mol_type = other RNA
aaaccgttaccattactgagtt

SEQ ID NO: 62899 - RNA, 22 nt, Synthetic Construct
  source 1..22: mol_type = other RNA
aaaccgttaccattactgagtt

SEQ ID NO: 62900 - RNA, 18 nt, Synthetic Construct
  source 1..18: mol_type = other RNA
aatcagcggggaaagaag

SEQ ID NO: 62901 - RNA, 18 nt, Synthetic Construct
  source 1..18: mol_type = other RNA
aatcagcggggaaagaag

SEQ ID NO: 62902 - RNA, 22 nt, Synthetic Construct
  source 1..22: mol_type = other RNA
tagcagcacgtatatattggcg

SEQ ID NO: 62903 - RNA, 24 nt, Synthetic Construct
  source 1..24: mol_type = other RNA
ggtaaacatccccgactggaagct

SEQ ID NO: 62904 - RNA, 20 nt, Synthetic Construct
  source 1..20: mol_type = other RNA
tgaggtagtgggttgtatag

SEQ ID NO: 62905 - RNA, 44 nt, Synthetic Construct; identical to SEQ ID NO: 6685
  source 1..44: mol_type = other RNA

SEQ ID NO: 62906 - RNA, 44 nt, Synthetic Construct; identical to SEQ ID NO: 6685
  source 1..44: mol_type = other RNA

SEQ ID NO: 62907 - RNA, 25 nt, Synthetic Construct
  source 1..25: mol_type = other RNA
tttccccttggggttgtaggaccac

SEQ ID NO: 62908 - RNA, 27 nt, Synthetic Construct
  source 1..27: mol_type = other RNA
cccctcactgctaaatttgactggctt

SEQ ID NO: 62909 - RNA, 27 nt, Synthetic Construct
  source 1..27: mol_type = other RNA
cccctcactgctaaatttgactggctt

SEQ ID NO: 62910 - RNA, 22 nt, Synthetic Construct
  source 1..22: mol_type = other RNA
actcggcgtggcgtcggtcgtg

SEQ ID NO: 62911 - RNA, 22 nt, Synthetic Construct
  source 1..22: mol_type = other RNA
actcggcgtggcgtcggtcgtg

SEQ ID NO: 62912 - RNA, 21 nt, Synthetic Construct
  source 1..21: mol_type = other RNA
tgaggcagtagattgtatagt

SEQ ID NO: 62913 - RNA, 21 nt, Synthetic Construct
  source 1..21: mol_type = other RNA
tgaggcagtagattgtatagt

SEQ ID NO: 62914 - RNA, 22 nt, Synthetic Construct
  source 1..22: mol_type = other RNA
ccactgccccaggtgctgctgg

SEQ ID NO: 62915 - RNA, 22 nt, Synthetic Construct
  source 1..22: mol_type = other RNA
ccactgccccaggtgctgctgg

SEQ ID NO: 62916 - RNA, 23 nt, Synthetic Construct
  source 1..23: mol_type = other RNA
tgaaagtaggtcatcgtcaggct

SEQ ID NO: 62917 - RNA, 23 nt, Synthetic Construct
  source 1..23: mol_type = other RNA
tgaaagtaggtcatcgtcaggct

SEQ ID NO: 62918 - RNA, 44 nt, Synthetic Construct; identical to SEQ ID NO: 3447
  source 1..44: mol_type = other RNA

SEQ ID NO: 62919 - RNA, 18 nt, Synthetic Construct
  source 1..18: mol_type = other RNA
ggctttgaagtaaggtcg

SEQ ID NO: 62920 - RNA, 22 nt, Synthetic Construct
  source 1..22: mol_type = other RNA
tggcagcacgtaaatattggcg

SEQ ID NO: 62921 - RNA, 22 nt, Synthetic Construct
  source 1..22: mol_type = other RNA
tggcagcacgtaaatattggcg

SEQ ID NO: 62922 - RNA, 23 nt, Synthetic Construct
  source 1..23: mol_type = other RNA
tggaatgtaaagaagtatgtacc

SEQ ID NO: 62923 - RNA, 27 nt, Synthetic Construct
  source 1..27: mol_type = other RNA
gactcttagcggtggatcactcggctc

SEQ ID NO: 62924 - RNA, 18 nt, Synthetic Construct
  source 1..18: mol_type = other RNA
tagtgggttatcagaaca

SEQ ID NO: 62925 - RNA, 21 nt, Synthetic Construct
  source 1..21: mol_type = other RNA
agaggtagtaggttgtgtggt

SEQ ID NO: 62926 - RNA, 23 nt, Synthetic Construct
  source 1..23: mol_type = other RNA
acagtagtctgcacattggttaa

SEQ ID NO: 62927 - RNA, 22 nt, Synthetic Construct
  source 1..22: mol_type = other RNA
tattgtacttgtcccggcctgt

SEQ ID NO: 62928 - RNA, 15 nt, Synthetic Construct
  source 1..15: mol_type = other RNA
gcagagcgtcggtct

SEQ ID NO: 62929 - RNA, 22 nt, Synthetic Construct
  source 1..22: mol_type = other RNA
cggctctgggtctgtggggagt

SEQ ID NO: 62930 - RNA, 22 nt, Synthetic Construct
  source 1..22: mol_type = other RNA
cggctctgggtctgtggggagt

SEQ ID NO: 62931 - RNA, 23 nt, Synthetic Construct
  source 1..23: mol_type = other RNA
tccagtactgagctgccccgagt

SEQ ID NO: 62932 - RNA, 19 nt, Synthetic Construct
  source 1..19: mol_type = other RNA
cctgtctgaatatgggggg

SEQ ID NO: 62933 - RNA, 22 nt, Synthetic Construct
  source 1..22: mol_type = other RNA
tattgtacttgtcccggcctgt

SEQ ID NO: 62934 - RNA, 23 nt, Synthetic Construct
  source 1..23: mol_type = other RNA
tagcttatcagactgatgttgac

SEQ ID NO: 62935 - RNA, 23 nt, Synthetic Construct
  source 1..23: mol_type = other RNA
tgaggggaagagagcgagacttt

SEQ ID NO: 62936 - RNA, 23 nt, Synthetic Construct
  source 1..23: mol_type = other RNA
tgaggggaagagagcgagacttt

SEQ ID NO: 62937 - RNA, 22 nt, Synthetic Construct
  source 1..22: mol_type = other RNA
tgagatagtaggttgtatagtt

SEQ ID NO: 62938 - RNA, 22 nt, Synthetic Construct
  source 1..22: mol_type = other RNA
tgagatagtaggttgtatagtt

SEQ ID NO: 62939 - RNA, 23 nt, Synthetic Construct
  source 1..23: mol_type = other RNA
tcctatactgagctgccccgaga

SEQ ID NO: 62940 - RNA, 22 nt, Synthetic Construct
  source 1..22: mol_type = other RNA
tgaggtagtagtttgtgctgat

SEQ ID NO: 62941 - RNA, 22 nt, Synthetic Construct
  source 1..22: mol_type = other RNA
tgaggtagtagtttgtgctgat

SEQ ID NO: 62942 - RNA, 16 nt, Synthetic Construct
  source 1..16: mol_type = other RNA
cagtcaggatgttggc

SEQ ID NO: 62943 - RNA, 21 nt, Synthetic Construct
  source 1..21: mol_type = other RNA
tacagtagtctgcacattggt

SEQ ID NO: 62944 - RNA, 21 nt, Synthetic Construct
  source 1..21: mol_type = other RNA
tacagtagtctgcacattggt

SEQ ID NO: 62945 - RNA, 19 nt, Synthetic Construct
  source 1..19: mol_type = other RNA
tagcagcacgtaaatattg

SEQ ID NO: 62946 - RNA, 19 nt, Synthetic Construct
  source 1..19: mol_type = other RNA
tagcagcacgtaaatattg

SEQ ID NO: 62947 - RNA, 21 nt, Synthetic Construct
  source 1..21: mol_type = other RNA
tgaggtagcagattgtatagt

SEQ ID NO: 62948 - RNA, 23 nt, Synthetic Construct
  source 1..23: mol_type = other RNA
tgaggtagtaggttgtatagttg

SEQ ID NO: 62949 - RNA, 28 nt, Synthetic Construct
  source 1..28: mol_type = other RNA
cccccccactgctaaatttgactggcta

SEQ ID NO: 62950 - RNA, 28 nt, Synthetic Construct
  source 1..28: mol_type = other RNA
cccccccactgctaaatttgactggcta

SEQ ID NO: 62951 - RNA, 24 nt, Synthetic Construct
  source 1..24: mol_type = other RNA
tgatatgtttgatatattaggttg

SEQ ID NO: 62952 - RNA, 25 nt, Synthetic Construct
  source 1..25: mol_type = other RNA
tgaggggcagagagcgagacttttt

SEQ ID NO: 62953 - RNA, 30 nt, Synthetic Construct; identical to SEQ ID NO: 1220
  source 1..30: mol_type = other RNA

SEQ ID NO: 62954 - RNA, 30 nt, Synthetic Construct; identical to SEQ ID NO: 1220
  source 1..30: mol_type = other RNA

SEQ ID NO: 62955 - RNA, 22 nt, Synthetic Construct
  source 1..22: mol_type = other RNA
tgaagtagtagtttgtgctgtt

SEQ ID NO: 62956 - RNA, 17 nt, Synthetic Construct
  source 1..17: mol_type = other RNA
atcgtgacgatagtgca

SEQ ID NO: 62957 - RNA, 17 nt, Synthetic Construct
  source 1..17: mol_type = other RNA
atcgtgacgatagtgca

SEQ ID NO: 62958 - RNA, 22 nt, Synthetic Construct
  source 1..22: mol_type = other RNA
tagcagcacgtaaatattgacg

SEQ ID NO: 62959 - RNA, 18 nt, Synthetic Construct
  source 1..18: mol_type = other RNA
ttctacagtccgacgatc

SEQ ID NO: 62960 - RNA, 18 nt, Synthetic Construct
  source 1..18: mol_type = other RNA
ttctacagtccgacgatc

SEQ ID NO: 62961 - RNA, 22 nt, Synthetic Construct
  source 1..22: mol_type = other RNA
tcgtaccgtgagtaataatgag

SEQ ID NO: 62962 - RNA, 22 nt, Synthetic Construct
  source 1..22: mol_type = other RNA
tcgtaccgtgagtaataatgag

SEQ ID NO: 62963 - RNA, 21 nt, Synthetic Construct
  source 1..21: mol_type = other RNA
tggagtgtgacaatggtgtta

SEQ ID NO: 62964 - RNA, 22 nt, Synthetic Construct
  source 1..22: mol_type = other RNA
tattgcacttgtcccagcctgt

SEQ ID NO: 62965 - RNA, 22 nt, Synthetic Construct
  source 1..22: mol_type = other RNA
tggaatgtaaagaagtatgtac

SEQ ID NO: 62966 - RNA, 22 nt, Synthetic Construct
  source 1..22: mol_type = other RNA
tggaatgtaaagaagtatgtac

SEQ ID NO: 62967 - RNA, 23 nt, Synthetic Construct
  source 1..23: mol_type = other RNA
tcactgatcgagtcgtcctgcgc

SEQ ID NO: 62968 - RNA, 22 nt, Synthetic Construct
  source 1..22: mol_type = other RNA
tgaggtagtaggttgtgtggtg

SEQ ID NO: 62969 - RNA, 22 nt, Synthetic Construct
  source 1..22: mol_type = other RNA
tgaggtagtaggttgtgtggtg

SEQ ID NO: 62970 - RNA, 21 nt, Synthetic Construct
  source 1..21: mol_type = other RNA
cgcaccgtgagtaataatgcg

SEQ ID NO: 62971 - RNA, 23 nt, Synthetic Construct
  source 1..23: mol_type = other RNA
tctcacacagaaatcgcacccgt

SEQ ID NO: 62972 - RNA, 23 nt, Synthetic Construct
  source 1..23: mol_type = other RNA
caaagcgctgttcgtgcaggtag

SEQ ID NO: 62973 - RNA, 23 nt, Synthetic Construct
  source 1..23: mol_type = other RNA
caaagcgctgttcgtgcaggtag

SEQ ID NO: 62974 - RNA, 28 nt, Synthetic Construct
  source 1..28: mol_type = other RNA
tgttggttcaagcgtgtagtcgtgctct

SEQ ID NO: 62975 - RNA, 23 nt, Synthetic Construct
  source 1..23: mol_type = other RNA
tagcagcacataatggtttgtgg

SEQ ID NO: 62976 - RNA, 23 nt, Synthetic Construct
  source 1..23: mol_type = other RNA
tagcagcacataatggtttgtgg

SEQ ID NO: 62977 - RNA, 20 nt, Synthetic Construct
  source 1..20: mol_type = other RNA
tgaggtagtaggttgcatag

SEQ ID NO: 62978 - RNA, 23 nt, Synthetic Construct
  source 1..23: mol_type = other RNA
tgaggtagtagtttgtgctgttc

SEQ ID NO: 62979 - RNA, 27 nt, Synthetic Construct
  source 1..27: mol_type = other RNA
gcattggtggttcagtggtagaattct

SEQ ID NO: 62980 - RNA, 22 nt, Synthetic Construct
  source 1..22: mol_type = other RNA
tagcagcaggtaaatattggcg

SEQ ID NO: 62981 - RNA, 22 nt, Synthetic Construct
  source 1..22: mol_type = other RNA
tagcagcaggtaaatattggcg

SEQ ID NO: 62982 - RNA, 21 nt, Synthetic Construct
  source 1..21: mol_type = other RNA
tgaggtggtaggttgtatagt

SEQ ID NO: 62983 - RNA, 21 nt, Synthetic Construct
  source 1..21: mol_type = other RNA
tcaggctcagtcccctcccgt

SEQ ID NO: 62984 - RNA, 21 nt, Synthetic Construct
  source 1..21: mol_type = other RNA
tcaggctcagtcccctcccgt

SEQ ID NO: 62985 - RNA, 18 nt, Synthetic Construct
  source 1..18: mol_type = other RNA
gttctacagtccgacgat

SEQ ID NO: 62986 - RNA, 18 nt, Synthetic Construct
  source 1..18: mol_type = other RNA
gttctacagtccgacgat

SEQ ID NO: 62987 - RNA, 17 nt, Synthetic Construct
  source 1..17: mol_type = other RNA
cgaggatccattggagg

SEQ ID NO: 62988 - RNA, 17 nt, Synthetic Construct
  source 1..17: mol_type = other RNA
cgaggatccattggagg

SEQ ID NO: 62989 - RNA, 20 nt, Synthetic Construct
  source 1..20: mol_type = other RNA
gagtaggacgttgccaggtt

SEQ ID NO: 62990 - RNA, 20 nt, Synthetic Construct
  source 1..20: mol_type = other RNA
gagtaggacgttgccaggtt

SEQ ID NO: 62991 - RNA, 42 nt, Synthetic Construct; identical to SEQ ID NO: 8009
  source 1..42: mol_type = other RNA

SEQ ID NO: 62992 - RNA, 42 nt, Synthetic Construct; identical to SEQ ID NO: 8009
  source 1..42: mol_type = other RNA

SEQ ID NO: 62993 - RNA, 24 nt, Synthetic Construct
  source 1..24: mol_type = other RNA
tctctcggctcctcgcggctcgct

SEQ ID NO: 62994 - RNA, 24 nt, Synthetic Construct
  source 1..24: mol_type = other RNA
tctctcggctcctcgcggctcgct

SEQ ID NO: 62995 - RNA, 23 nt, Synthetic Construct
  source 1..23: mol_type = other RNA
tcgtaccgtgagtaataatgcgt

SEQ ID NO: 62996 - RNA, 23 nt, Synthetic Construct
  source 1..23: mol_type = other RNA
tcgtaccgtgagtaataatgcgt

SEQ ID NO: 62997 - RNA, 22 nt, Synthetic Construct
  source 1..22: mol_type = other RNA
tgaggtagtaggtagtgtggtt

SEQ ID NO: 62998 - RNA, 23 nt, Synthetic Construct
  source 1..23: mol_type = other RNA
taccacagggtagaaccacggac

SEQ ID NO: 62999 - RNA, 23 nt, Synthetic Construct
  source 1..23: mol_type = other RNA
taccacagggtagaaccacggac

SEQ ID NO: 63000 - RNA, 23 nt, Synthetic Construct
  source 1..23: mol_type = other RNA
tcatgtactgagctgccccgaga

SEQ ID NO: 63001 - RNA, 23 nt, Synthetic Construct
  source 1..23: mol_type = other RNA
tcatgtactgagctgccccgaga

SEQ ID NO: 63002 - RNA, 34 nt, Synthetic Construct; identical to SEQ ID NO: 490
  source 1..34: mol_type = other RNA

SEQ ID NO: 63003 - RNA, 34 nt, Synthetic Construct; identical to SEQ ID NO: 490
  source 1..34: mol_type = other RNA

SEQ ID NO: 63004 - RNA, 22 nt, Synthetic Construct
  source 1..22: mol_type = other RNA
tgaggtagtagaatgtatagtt

SEQ ID NO: 63005 - RNA, 22 nt, Synthetic Construct
  source 1..22: mol_type = other RNA
tgaggtagtagaatgtatagtt

SEQ ID NO: 63006 - RNA, 17 nt, Synthetic Construct
  source 1..17: mol_type = other RNA
tgccagcagccgcggta

SEQ ID NO: 63007 - RNA, 22 nt, Synthetic Construct
  source 1..22: mol_type = other RNA
tgtaaacatccttgactggaag

SEQ ID NO: 63008 - RNA, 22 nt, Synthetic Construct
  source 1..22: mol_type = other RNA
tgtaaacatccttgactggaag

SEQ ID NO: 63009 - RNA, 19 nt, Synthetic Construct
  source 1..19: mol_type = other RNA
tttgttcgttcggctcgcg

SEQ ID NO: 63010 - RNA, 19 nt, Synthetic Construct
  source 1..19: mol_type = other RNA
tttgttcgttcggctcgcg

SEQ ID NO: 63011 - RNA, 21 nt, Synthetic Construct
  source 1..21: mol_type = other RNA
gtccagttttcccaggaatcc

SEQ ID NO: 63012 - RNA, 21 nt, Synthetic Construct
  source 1..21: mol_type = other RNA
gtccagttttcccaggaatcc

SEQ ID NO: 63013 - RNA, 24 nt, Synthetic Construct
  source 1..24: mol_type = other RNA
tgatatgtttgatatattaggttg

SEQ ID NO: 63014 - RNA, 23 nt, Synthetic Construct
  source 1..23: mol_type = other RNA
ctcgtaccgtgagtaataatgcg

SEQ ID NO: 63015 - RNA, 16 nt, Synthetic Construct
  source 1..16: mol_type = other RNA
cacaccgcccgtcgct

SEQ ID NO: 63016 - RNA, 16 nt, Synthetic Construct
  source 1..16: mol_type = other RNA
cacaccgcccgtcgct

SEQ ID NO: 63017 - RNA, 20 nt, Synthetic Construct
  source 1..20: mol_type = other RNA
cgaggtagtaggttgtatag

SEQ ID NO: 63018 - RNA, 15 nt, Synthetic Construct
  source 1..15: mol_type = other RNA
ccagaaacccggtcg

SEQ ID NO: 63019 - RNA, 15 nt, Synthetic Construct
  source 1..15: mol_type = other RNA
ccagaaacccggtcg

SEQ ID NO: 63020 - RNA, 20 nt, Synthetic Construct
  source 1..20: mol_type = other RNA
caggacagtgaaacgagtca

SEQ ID NO: 63021 - RNA, 20 nt, Synthetic Construct
  source 1..20: mol_type = other RNA
caggacagtgaaacgagtca

SEQ ID NO: 63022 - RNA, 20 nt, Synthetic Construct
  source 1..20: mol_type = other RNA
gtcagtttgtcaaatacccc

SEQ ID NO: 63023 - RNA, 20 nt, Synthetic Construct
  source 1..20: mol_type = other RNA
gtcagtttgtcaaatacccc

SEQ ID NO: 63024 - RNA, 22 nt, Synthetic Construct
  source 1..22: mol_type = other RNA
cgtaccgtgagtaataatgcgt

SEQ ID NO: 63025 - RNA, 22 nt, Synthetic Construct
  source 1..22: mol_type = other RNA
cgtaccgtgagtaataatgcgt

SEQ ID NO: 63026 - RNA, 22 nt, Synthetic Construct
  source 1..22: mol_type = other RNA
tagtgggttatcagaacttatt

SEQ ID NO: 63027 - RNA, 19 nt, Synthetic Construct
  source 1..19: mol_type = other RNA
acggaagggcaccaccagg

SEQ ID NO: 63028 - RNA, 19 nt, Synthetic Construct
  source 1..19: mol_type = other RNA
acggaagggcaccaccagg

SEQ ID NO: 63029 - RNA, 22 nt, Synthetic Construct
  source 1..22: mol_type = other RNA
tgaggtagaaggttgtatagtt

SEQ ID NO: 63030 - RNA, 32 nt, Synthetic Construct; identical to SEQ ID NO: 34841
  source 1..32: mol_type = other RNA

SEQ ID NO: 63031 - RNA, 32 nt, Synthetic Construct; identical to SEQ ID NO: 34841
  source 1..32: mol_type = other RNA

SEQ ID NO: 63032 - RNA, 21 nt, Synthetic Construct
  source 1..21: mol_type = other RNA
agaggtagtaggttgtgtggt

SEQ ID NO: 63033 - RNA, 21 nt, Synthetic Construct
  source 1..21: mol_type = other RNA
agaggtagtaggttgtgtggt

SEQ ID NO: 63034 - RNA, 22 nt, Synthetic Construct
  source 1..22: mol_type = other RNA
tcgaatccgagtcacggcacca

SEQ ID NO: 63035 - RNA, 22 nt, Synthetic Construct
  source 1..22: mol_type = other RNA
tcgaatccgagtcacggcacca

SEQ ID NO: 63036 - RNA, 19 nt, Synthetic Construct
  source 1..19: mol_type = other RNA
tcctgtaccgatcaatagt

SEQ ID NO: 63037 - RNA, 19 nt, Synthetic Construct
  source 1..19: mol_type = other RNA
tcctgtaccgatcaatagt

SEQ ID NO: 63038 - RNA, 22 nt, Synthetic Construct
  source 1..22: mol_type = other RNA
tcgtaccgtgagtaatagtgcg

SEQ ID NO: 63039 - RNA, 21 nt, Synthetic Construct
  source 1..21: mol_type = other RNA
tgaggtagtaggttatgtggt

SEQ ID NO: 63040 - RNA, 23 nt, Synthetic Construct
  source 1..23: mol_type = other RNA
tgacctatgaattgacagccagt

SEQ ID NO: 63041 - RNA, 24 nt, Synthetic Construct
  source 1..24: mol_type = other RNA
atcacattgccagggatttccaat

SEQ ID NO: 63042 - RNA, 24 nt, Synthetic Construct
  source 1..24: mol_type = other RNA
atcacattgccagggatttccaat

SEQ ID NO: 63043 - RNA, 20 nt, Synthetic Construct
  source 1..20: mol_type = other RNA
tagcgaaattccttgtcggg

SEQ ID NO: 63044 - RNA, 21 nt, Synthetic Construct
  source 1..21: mol_type = other RNA
tgaggtagtaggttgtgtgat

SEQ ID NO: 63045 - RNA, 15 nt, Synthetic Construct
  source 1..15: mol_type = other RNA
gtctcgccgacggca

SEQ ID NO: 63046 - RNA, 42 nt, Synthetic Construct; identical to SEQ ID NO: 8009
  source 1..42: mol_type = other RNA

SEQ ID NO: 63047 - RNA, 18 nt, Synthetic Construct
  source 1..18: mol_type = other RNA
ggttcgattccggagagg

SEQ ID NO: 63048 - RNA, 18 nt, Synthetic Construct
  source 1..18: mol_type = other RNA
ggttcgattccggagagg

SEQ ID NO: 63049 - RNA, 19 nt, Synthetic Construct
  source 1..19: mol_type = other RNA
gtggtacgatcatacctgg

SEQ ID NO: 63050 - RNA, 19 nt, Synthetic Construct
  source 1..19: mol_type = other RNA
gtggtacgatcatacctgg

SEQ ID NO: 63051 - RNA, 22 nt, Synthetic Construct
  source 1..22: mol_type = other RNA
tgaggtagtaggttgcatagtt

SEQ ID NO: 63052 - RNA, 22 nt, Synthetic Construct
  source 1..22: mol_type = other RNA
tgaggtagtaggttgcatagtt

SEQ ID NO: 63053 - RNA, 22 nt, Synthetic Construct
  source 1..22: mol_type = other RNA
taacactgtctggtaacgatgt

SEQ ID NO: 63054 - RNA, 25 nt, Synthetic Construct
  source 1..25: mol_type = other RNA
gcgccgctggtgtagtggtatcatg

SEQ ID NO: 63055 - RNA, 16 nt, Synthetic Construct
  source 1..16: mol_type = other RNA
ctctacggccatacca

SEQ ID NO: 63056 - RNA, 16 nt, Synthetic Construct
  source 1..16: mol_type = other RNA
ctctacggccatacca

SEQ ID NO: 63057 - RNA, 22 nt, Synthetic Construct
  source 1..22: mol_type = other RNA
tgaggtggtagattgtatagtt

SEQ ID NO: 63058 - RNA, 22 nt, Synthetic Construct
  source 1..22: mol_type = other RNA
tgaggtggtagattgtatagtt

SEQ ID NO: 63059 - RNA, 20 nt, Synthetic Construct
  source 1..20: mol_type = other RNA
tggggtagtaggttgtatag

SEQ ID NO: 63060 - RNA, 21 nt, Synthetic Construct
  source 1..21: mol_type = other RNA
attagtgacgcgcatgaatgg

SEQ ID NO: 63061 - RNA, 21 nt, Synthetic Construct
  source 1..21: mol_type = other RNA
attagtgacgcgcatgaatgg

SEQ ID NO: 63062 - RNA, 20 nt, Synthetic Construct
  source 1..20: mol_type = other RNA
caaagaattctccttttggg

SEQ ID NO: 63063 - RNA, 22 nt, Synthetic Construct
  source 1..22: mol_type = other RNA
tattgcatttgtcccggcctgt

SEQ ID NO: 63064 - RNA, 26 nt, Synthetic Construct
  source 1..26: mol_type = other RNA
tgaggtagtaggttgtgtggtttttt

SEQ ID NO: 63065 - RNA, 24 nt, Synthetic Construct
  source 1..24: mol_type = other RNA
gctcactgatcgagtcgtcctgcg

SEQ ID NO: 63066 - RNA, 24 nt, Synthetic Construct
  source 1..24: mol_type = other RNA
gctcactgatcgagtcgtcctgcg

SEQ ID NO: 63067 - RNA, 24 nt, Synthetic Construct
  source 1..24: mol_type = other RNA
tgtaaacatccccgactggaggct

SEQ ID NO: 63068 - RNA, 24 nt, Synthetic Construct
  source 1..24: mol_type = other RNA
tgtaaacatccccgactggaggct

SEQ ID NO: 63069 - RNA, 22 nt, Synthetic Construct
  source 1..22: mol_type = other RNA
tgaggttgtaggttgtatagtt

SEQ ID NO: 63070 - RNA, 22 nt, Synthetic Construct
  source 1..22: mol_type = other RNA
tgaggttgtaggttgtatagtt

SEQ ID NO: 63071 - RNA, 22 nt, Synthetic Construct
  source 1..22: mol_type = other RNA
tgtcagtttgtcaaatacacca

SEQ ID NO: 63072 - RNA, 20 nt, Synthetic Construct
  source 1..20: mol_type = other RNA
tgtaaacatccccgactgga

SEQ ID NO: 63073 - RNA, 23 nt, Synthetic Construct
  source 1..23: mol_type = other RNA
tggtaacacgacgtacttagtgt

SEQ ID NO: 63074 - RNA, 23 nt, Synthetic Construct
  source 1..23: mol_type = other RNA
tggtaacacgacgtacttagtgt

SEQ ID NO: 63075 - RNA, 23 nt, Synthetic Construct
  source 1..23: mol_type = other RNA
tgagaactgaattccatgggttg

SEQ ID NO: 63076 - RNA, 21 nt, Synthetic Construct
  source 1..21: mol_type = other RNA
atcacattgccagggattacc

SEQ ID NO: 63077 - RNA, 23 nt, Synthetic Construct
  source 1..23: mol_type = other RNA
tcctgtactgagctgccccgatt

SEQ ID NO: 63078 - RNA, 16 nt, Synthetic Construct
  source 1..16: mol_type = other RNA
acggcccagactccta

SEQ ID NO: 63079 - RNA, 31 nt, Synthetic Construct; identical to SEQ ID NO: 774
  source 1..31: mol_type = other RNA

SEQ ID NO: 63080 - RNA, 31 nt, Synthetic Construct; identical to SEQ ID NO: 774
  source 1..31: mol_type = other RNA

SEQ ID NO: 63081 - RNA, 15 nt, Synthetic Construct
  source 1..15: mol_type = other RNA
tcagtagctcgagga

SEQ ID NO: 63082 - RNA, 15 nt, Synthetic Construct
  source 1..15: mol_type = other RNA
tcagtagctcgagga

SEQ ID NO: 63083 - RNA, 27 nt, Synthetic Construct
  source 1..27: mol_type = other RNA
ccccccactgctaaatttgactggctg

SEQ ID NO: 63084 - RNA, 22 nt, Synthetic Construct
  source 1..22: mol_type = other RNA
ttcaagtaattcaggataggct

SEQ ID NO: 63085 - RNA, 22 nt, Synthetic Construct
  source 1..22: mol_type = other RNA
ttcaagtaattcaggataggct

SEQ ID NO: 63086 - RNA, 21 nt, Synthetic Construct
  source 1..21: mol_type = other RNA
tcctgtactgagctgcaccga

SEQ ID NO: 63087 - RNA, 21 nt, Synthetic Construct
  source 1..21: mol_type = other RNA
tcctgtactgagctgcaccga

SEQ ID NO: 63088 - RNA, 22 nt, Synthetic Construct
  source 1..22: mol_type = other RNA
atataatacaacctgctaagtg

SEQ ID NO: 63089 - RNA, 27 nt, Synthetic Construct
  source 1..27: mol_type = other RNA
tcggctgttaaccgaaaggttggtggt

SEQ ID NO: 63090 - RNA, 21 nt, Synthetic Construct
  source 1..21: mol_type = other RNA
tgaggtagcaggttgtatagt

SEQ ID NO: 63091 - RNA, 20 nt, Synthetic Construct
  source 1..20: mol_type = other RNA
tgaggtagtaggtcgtatag

SEQ ID NO: 63092 - RNA, 23 nt, Synthetic Construct
  source 1..23: mol_type = other RNA
aacattcaacgctgtcggtgaga

SEQ ID NO: 63093 - RNA, 22 nt, Synthetic Construct
  source 1..22: mol_type = other RNA
caaagtgcttacagtgcaggta

SEQ ID NO: 63094 - RNA, 22 nt, Synthetic Construct
  source 1..22: mol_type = other RNA
caaagtgcttacagtgcaggta

SEQ ID NO: 63095 - RNA, 21 nt, Synthetic Construct
  source 1..21: mol_type = other RNA
acctgtactgagctgccccga

SEQ ID NO: 63096 - RNA, 21 nt, Synthetic Construct
  source 1..21: mol_type = other RNA
acctgtactgagctgccccga

SEQ ID NO: 63097 - RNA, 22 nt, Synthetic Construct
  source 1..22: mol_type = other RNA
taactccttaagcgaatctagc

SEQ ID NO: 63098 - RNA, 22 nt, Synthetic Construct
  source 1..22: mol_type = other RNA
taactccttaagcgaatctagc

SEQ ID NO: 63099 - RNA, 27 nt, Synthetic Construct
  source 1..27: mol_type = other RNA
ccccccactgctaaatttgactagctt

SEQ ID NO: 63100 - RNA, 27 nt, Synthetic Construct
  source 1..27: mol_type = other RNA
ccccccactgctaaatttgactagctt

SEQ ID NO: 63101 - RNA, 24 nt, Synthetic Construct
  source 1..24: mol_type = other RNA
tcttggagtaggtcattgggtgtt

SEQ ID NO: 63102 - RNA, 21 nt, Synthetic Construct
  source 1..21: mol_type = other RNA
ctagactgaagccccttgagg

SEQ ID NO: 63103 - RNA, 21 nt, Synthetic Construct
  source 1..21: mol_type = other RNA
ctagactgaagccccttgagg

SEQ ID NO: 63104 - RNA, 24 nt, Synthetic Construct
  source 1..24: mol_type = other RNA
agcagcattgtacagggctatgtt

SEQ ID NO: 63105 - RNA, 23 nt, Synthetic Construct
  source 1..23: mol_type = other RNA
caacggaaccccaaaagcagctg

SEQ ID NO: 63106 - RNA, 23 nt, Synthetic Construct
  source 1..23: mol_type = other RNA
caacggaaccccaaaagcagctg

SEQ ID NO: 63107 - RNA, 21 nt, Synthetic Construct
  source 1..21: mol_type = other RNA
tacctggttgatcctgccagt

SEQ ID NO: 63108 - RNA, 18 nt, Synthetic Construct
  source 1..18: mol_type = other RNA
accaaggggtcgtgggtt

SEQ ID NO: 63109 - RNA, 18 nt, Synthetic Construct
  source 1..18: mol_type = other RNA
accaaggggtcgtgggtt

SEQ ID NO: 63110 - RNA, 21 nt, Synthetic Construct
  source 1..21: mol_type = other RNA
tccctgtcctccaggagctca

SEQ ID NO: 63111 - RNA, 22 nt, Synthetic Construct
  source 1..22: mol_type = other RNA
tcgtactgtgagtaataatgcg

SEQ ID NO: 63112 - RNA, 22 nt, Synthetic Construct
  source 1..22: mol_type = other RNA
ctagcaccatttgaaatcagtg

SEQ ID NO: 63113 - RNA, 22 nt, Synthetic Construct
  source 1..22: mol_type = other RNA
ctagcaccatttgaaatcagtg

SEQ ID NO: 63114 - RNA, 29 nt, Synthetic Construct
  source 1..29: mol_type = other RNA
cccccccactgctaaatttgactggcttt

SEQ ID NO: 63115 - RNA, 29 nt, Synthetic Construct
  source 1..29: mol_type = other RNA
cccccccactgctaaatttgactggcttt

SEQ ID NO: 63116 - RNA, 22 nt, Synthetic Construct
  source 1..22: mol_type = other RNA
tcgtatcgtgagtaataatgcg

SEQ ID NO: 63117 - RNA, 22 nt, Synthetic Construct
  source 1..22: mol_type = other RNA
tcgtatcgtgagtaataatgcg

SEQ ID NO: 63118 - RNA, 36 nt, Synthetic Construct; identical to SEQ ID NO: 2520
  source 1..36: mol_type = other RNA

SEQ ID NO: 63119 - RNA, 37 nt, Synthetic Construct; identical to SEQ ID NO: 4277
  source 1..37: mol_type = other RNA

SEQ ID NO: 63120 - RNA, 37 nt, Synthetic Construct; identical to SEQ ID NO: 4277
  source 1..37: mol_type = other RNA

SEQ ID NO: 63121 - RNA, 22 nt, Synthetic Construct
  source 1..22: mol_type = other RNA
tattgcacttgtcccggcccgt

SEQ ID NO: 63122 - RNA, 21 nt, Synthetic Construct
  source 1..21: mol_type = other RNA
taactccttaagcgaatctcg

SEQ ID NO: 63123 - RNA, 21 nt, Synthetic Construct
  source 1..21: mol_type = other RNA
taactccttaagcgaatctcg

SEQ ID NO: 63124 - RNA, 22 nt, Synthetic Construct
  source 1..22: mol_type = other RNA
tgaggtagtagtttgcgctgtt

SEQ ID NO: 63125 - RNA, 22 nt, Synthetic Construct
  source 1..22: mol_type = other RNA
tgaggtagtagtttgcgctgtt

SEQ ID NO: 63126 - RNA, 21 nt, Synthetic Construct
  source 1..21: mol_type = other RNA
tgaggggcagagagcgagaca

SEQ ID NO: 63127 - RNA, 21 nt, Synthetic Construct
  source 1..21: mol_type = other RNA
tgaggggcagagagcgagaca

SEQ ID NO: 63128 - RNA, 22 nt, Synthetic Construct
  source 1..22: mol_type = other RNA
tgtgactggttgaccagagggg

SEQ ID NO: 63129 - RNA, 23 nt, Synthetic Construct
  source 1..23: mol_type = other RNA
tggaaatacgacgtacttagtgt

SEQ ID NO: 63130 - RNA, 23 nt, Synthetic Construct
  source 1..23: mol_type = other RNA
tggaaatacgacgtacttagtgt

SEQ ID NO: 63131 - RNA, 20 nt, Synthetic Construct
  source 1..20: mol_type = other RNA
cgcgacctcagatcagacgt

SEQ ID NO: 63132 - RNA, 20 nt, Synthetic Construct
  source 1..20: mol_type = other RNA
cgcgacctcagatcagacgt

SEQ ID NO: 63133 - RNA, 26 nt, Synthetic Construct
  source 1..26: mol_type = other RNA
ttaagtgacgatagcctaggagatac

SEQ ID NO: 63134 - RNA, 26 nt, Synthetic Construct
  source 1..26: mol_type = other RNA
ttaagtgacgatagcctaggagatac

SEQ ID NO: 63135 - RNA, 20 nt, Synthetic Construct
  source 1..20: mol_type = other RNA
cacatgcaagtcgaacggta

SEQ ID NO: 63136 - RNA, 23 nt, Synthetic Construct
  source 1..23: mol_type = other RNA
ttagtgacgcgcatgaatggatt

SEQ ID NO: 63137 - RNA, 23 nt, Synthetic Construct
  source 1..23: mol_type = other RNA
ttagtgacgcgcatgaatggatt

SEQ ID NO: 63138 - RNA, 25 nt, Synthetic Construct
  source 1..25: mol_type = other RNA
agctcggtctgaggcccctcagttt

SEQ ID NO: 63139 - RNA, 18 nt, Synthetic Construct
  source 1..18: mol_type = other RNA
acagtcaggatgttggct

SEQ ID NO: 63140 - RNA, 23 nt, Synthetic Construct
  source 1..23: mol_type = other RNA
ttatggtttgcctgggactgagt

SEQ ID NO: 63141 - RNA, 18 nt, Synthetic Construct
  source 1..18: mol_type = other RNA
cccaaaggtcgtcggttc

SEQ ID NO: 63142 - RNA, 23 nt, Synthetic Construct
  source 1..23: mol_type = other RNA
tcaggctcagtcccctcccgttt

SEQ ID NO: 63143 - RNA, 23 nt, Synthetic Construct
  source 1..23: mol_type = other RNA
tcaggctcagtcccctcccgttt

SEQ ID NO: 63144 - RNA, 18 nt, Synthetic Construct
  source 1..18: mol_type = other RNA
gcgccgatgatagtgcgg

SEQ ID NO: 63145 - RNA, 42 nt, Synthetic Construct; identical to SEQ ID NO: 8009
  source 1..42: mol_type = other RNA

SEQ ID NO: 63146 - RNA, 23 nt, Synthetic Construct
  source 1..23: mol_type = other RNA
tgaggtagtaggttgtgtggttt

SEQ ID NO: 63147 - RNA, 22 nt, Synthetic Construct
  source 1..22: mol_type = other RNA
tcgaaccgtgagtaataatgcg

SEQ ID NO: 63148 - RNA, 22 nt, Synthetic Construct
  source 1..22: mol_type = other RNA
tcgaaccgtgagtaataatgcg

SEQ ID NO: 63149 - RNA, 20 nt, Synthetic Construct
  source 1..20: mol_type = other RNA
cggggcagctcagtacagga

SEQ ID NO: 63150 - RNA, 20 nt, Synthetic Construct
  source 1..20: mol_type = other RNA
cggggcagctcagtacagga

SEQ ID NO: 63151 - RNA, 25 nt, Synthetic Construct
  source 1..25: mol_type = other RNA
agctcggtctgaggcccctcagttt

SEQ ID NO: 63152 - RNA, 23 nt, Synthetic Construct
  source 1..23: mol_type = other RNA
agcagcattgtacagggctacga

SEQ ID NO: 63153 - RNA, 23 nt, Synthetic Construct
  source 1..23: mol_type = other RNA
tggtaatacgacgtacttggtgt

SEQ ID NO: 63154 - RNA, 23 nt, Synthetic Construct
  source 1..23: mol_type = other RNA
tggtaatacgacgtacttggtgt

SEQ ID NO: 63155 - RNA, 22 nt, Synthetic Construct
  source 1..22: mol_type = other RNA
atgctgacatatttactagagg

SEQ ID NO: 63156 - RNA, 22 nt, Synthetic Construct
  source 1..22: mol_type = other RNA
atgctgacatatttactagagg

SEQ ID NO: 63157 - RNA, 23 nt, Synthetic Construct
  source 1..23: mol_type = other RNA
caaagtgctgttagtgcaggtag

SEQ ID NO: 63158 - RNA, 23 nt, Synthetic Construct
  source 1..23: mol_type = other RNA
caaagtgctgttagtgcaggtag

SEQ ID NO: 63159 - RNA, 22 nt, Synthetic Construct
  source 1..22: mol_type = other RNA
tagcagcgcgtaaatattggcg

SEQ ID NO: 63160 - RNA, 23 nt, Synthetic Construct
  source 1..23: mol_type = other RNA
cgtgtatttgacaagctgagttg

SEQ ID NO: 63161 - RNA, 23 nt, Synthetic Construct
  source 1..23: mol_type = other RNA
cgtgtatttgacaagctgagttg

SEQ ID NO: 63162 - RNA, 22 nt, Synthetic Construct
  source 1..22: mol_type = other RNA
tcacagtgaaccggtctcttta

SEQ ID NO: 63163 - RNA, 27 nt, Synthetic Construct
  source 1..27: mol_type = other RNA
ccccccacagctaaatttgactggcta

SEQ ID NO: 63164 - RNA, 18 nt, Synthetic Construct
  source 1..18: mol_type = other RNA
atcccactcctgacacca

SEQ ID NO: 63165 - RNA, 21 nt, Synthetic Construct
  source 1..21: mol_type = other RNA
tgaggtagtagatcgtatagt

SEQ ID NO: 63166 - RNA, 27 nt, Synthetic Construct
  source 1..27: mol_type = other RNA
ccccccgctgctaaatttgactggcta

SEQ ID NO: 63167 - RNA, 20 nt, Synthetic Construct
  source 1..20: mol_type = other RNA
acctgtactgagctgccccg

SEQ ID NO: 63168 - RNA, 20 nt, Synthetic Construct
  source 1..20: mol_type = other RNA
acctgtactgagctgccccg

SEQ ID NO: 63169 - RNA, 18 nt, Synthetic Construct
  source 1..18: mol_type = other RNA
aagaccctgttgagcttg

SEQ ID NO: 63170 - RNA, 18 nt, Synthetic Construct
  source 1..18: mol_type = other RNA
aagaccctgttgagcttg

SEQ ID NO: 63171 - RNA, 21 nt, Synthetic Construct
  source 1..21: mol_type = other RNA
aaaccgttaccattactgagt

SEQ ID NO: 63172 - RNA, 21 nt, Synthetic Construct
  source 1..21: mol_type = other RNA
aaaccgttaccattactgagt

SEQ ID NO: 63173 - RNA, 29 nt, Synthetic Construct
  source 1..29: mol_type = other RNA
cattggtggttcagtggtagaattctcgc

SEQ ID NO: 63174 - RNA, 29 nt, Synthetic Construct
  source 1..29: mol_type = other RNA
cattggtggttcagtggtagaattctcgc

SEQ ID NO: 63175 - RNA, 21 nt, Synthetic Construct
  source 1..21: mol_type = other RNA
agcagcattgtacagggctat

SEQ ID NO: 63176 - RNA, 21 nt, Synthetic Construct
  source 1..21: mol_type = other RNA
agcagcattgtacagggctat

SEQ ID NO: 63177 - RNA, 21 nt, Synthetic Construct
  source 1..21: mol_type = other RNA
ctagaccgaagctccttgagg

SEQ ID NO: 63178 - RNA, 34 nt, Synthetic Construct; identical to SEQ ID NO: 1506
  source 1..34: mol_type = other RNA

SEQ ID NO: 63179 - RNA, 34 nt, Synthetic Construct; identical to SEQ ID NO: 1506
  source 1..34: mol_type = other RNA

SEQ ID NO: 63180 - RNA, 28 nt, Synthetic Construct
  source 1..28: mol_type = other RNA
ggcagggttcgtgactggggtgaagtcg

SEQ ID NO: 63181 - RNA, 28 nt, Synthetic Construct
  source 1..28: mol_type = other RNA
ggcagggttcgtgactggggtgaagtcg

SEQ ID NO: 63182 - RNA, 37 nt, Synthetic Construct; identical to SEQ ID NO: 715
  source 1..37: mol_type = other RNA

SEQ ID NO: 63183 - RNA, 22 nt, Synthetic Construct
  source 1..22: mol_type = other RNA
gaagcacattcgcacatcatat

SEQ ID NO: 63184 - RNA, 22 nt, Synthetic Construct
  source 1..22: mol_type = other RNA
gaagcacattcgcacatcatat

SEQ ID NO: 63185 - RNA, 23 nt, Synthetic Construct
  source 1..23: mol_type = other RNA
cccagtgttcagactacctgttc

SEQ ID NO: 63186 - RNA, 20 nt, Synthetic Construct
  source 1..20: mol_type = other RNA
ggaggtagtaggttgtgtgg

SEQ ID NO: 63187 - RNA, 20 nt, Synthetic Construct
  source 1..20: mol_type = other RNA
ggaggtagtaggttgtgtgg

SEQ ID NO: 63188 - RNA, 17 nt, Synthetic Construct
  source 1..17: mol_type = other RNA
agacagcaggacggtgg

SEQ ID NO: 63189 - RNA, 17 nt, Synthetic Construct
  source 1..17: mol_type = other RNA
agacagcaggacggtgg

SEQ ID NO: 63190 - RNA, 23 nt, Synthetic Construct
  source 1..23: mol_type = other RNA
caaagtgctgttcgtgcaggtaa

SEQ ID NO: 63191 - RNA, 23 nt, Synthetic Construct
  source 1..23: mol_type = other RNA
caaagtgctgttcgtgcaggtaa

SEQ ID NO: 63192 - RNA, 21 nt, Synthetic Construct
  source 1..21: mol_type = other RNA
tccctgtcctccaggagctct

SEQ ID NO: 63193 - RNA, 21 nt, Synthetic Construct
  source 1..21: mol_type = other RNA
tccctgtcctccaggagctct

SEQ ID NO: 63194 - RNA, 22 nt, Synthetic Construct
  source 1..22: mol_type = other RNA
gaagaggacttggaactcgatc

SEQ ID NO: 63195 - RNA, 23 nt, Synthetic Construct
  source 1..23: mol_type = other RNA
tggtaatacgacgtacctagtgt

SEQ ID NO: 63196 - RNA, 22 nt, Synthetic Construct
  source 1..22: mol_type = other RNA
tgaggtagcagtttgtgctgtt

SEQ ID NO: 63197 - RNA, 17 nt, Synthetic Construct
  source 1..17: mol_type = other RNA
cagtagctcgaggaaaa

SEQ ID NO: 63198 - RNA, 17 nt, Synthetic Construct
  source 1..17: mol_type = other RNA
cagtagctcgaggaaaa

SEQ ID NO: 63199 - RNA, 22 nt, Synthetic Construct
  source 1..22: mol_type = other RNA
cattgcacctgtctcggtctga

SEQ ID NO: 63200 - RNA, 22 nt, Synthetic Construct
  source 1..22: mol_type = other RNA
tcctgtacagagctgccccgag

SEQ ID NO: 63201 - RNA, 22 nt, Synthetic Construct
  source 1..22: mol_type = other RNA
tcctgtacagagctgccccgag

SEQ ID NO: 63202 - RNA, 22 nt, Synthetic Construct
  source 1..22: mol_type = other RNA
tagcagcacgtaaatagtggcg

SEQ ID NO: 63203 - RNA, 22 nt, Synthetic Construct
  source 1..22: mol_type = other RNA
catagcacttgtctcggtctga

SEQ ID NO: 63204 - RNA, 22 nt, Synthetic Construct
  source 1..22: mol_type = other RNA
cattgcacttgtctcagtctga

SEQ ID NO: 63205 - RNA, 22 nt, Synthetic Construct
  source 1..22: mol_type = other RNA
cattgcacttgtctcagtctga

SEQ ID NO: 63206 - RNA, 34 nt, Synthetic Construct; identical to SEQ ID NO: 6594
  source 1..34: mol_type = other RNA

SEQ ID NO: 63207 - RNA, 22 nt, Synthetic Construct
  source 1..22: mol_type = other RNA
tcaggtagtaggttgtatagtt

SEQ ID NO: 63208 - RNA, 30 nt, Synthetic Construct; identical to SEQ ID NO: 1641
  source 1..30: mol_type = other RNA

SEQ ID NO: 63209 - RNA, 30 nt, Synthetic Construct; identical to SEQ ID NO: 1641
  source 1..30: mol_type = other RNA

SEQ ID NO: 63210 - RNA, 27 nt, Synthetic Construct
  source 1..27: mol_type = other RNA
ccacccactgctaaatttgactggctt

SEQ ID NO: 63211 - RNA, 22 nt, Synthetic Construct
  source 1..22: mol_type = other RNA
tagcagcacgtgaatattggcg

SEQ ID NO: 63212 - RNA, 21 nt, Synthetic Construct
  source 1..21: mol_type = other RNA
tccctgagaccctttaacctg

SEQ ID NO: 63213 - RNA, 37 nt, Synthetic Construct; identical to SEQ ID NO: 2482
  source 1..37: mol_type = other RNA

SEQ ID NO: 63214 - RNA, 37 nt, Synthetic Construct; identical to SEQ ID NO: 2482
  source 1..37: mol_type = other RNA

SEQ ID NO: 63215 - RNA, 27 nt, Synthetic Construct
  source 1..27: mol_type = other RNA
tcggctgttaaccgaaaggttggtggt

SEQ ID NO: 63216 - RNA, 28 nt, Synthetic Construct
  source 1..28: mol_type = other RNA
ccccccgctgctaaatttgactggcttt

SEQ ID NO: 63217 - RNA, 21 nt, Synthetic Construct
  source 1..21: mol_type = other RNA
tgtaacagcaactccatgtgg

SEQ ID NO: 63218 - RNA, 21 nt, Synthetic Construct
  source 1..21: mol_type = other RNA
tgtaacagcaactccatgtgg

SEQ ID NO: 63219 - RNA, 22 nt, Synthetic Construct
  source 1..22: mol_type = other RNA
catcgcacttgtctcggtctga

SEQ ID NO: 63220 - RNA, 22 nt, Synthetic Construct
  source 1..22: mol_type = other RNA
catcgcacttgtctcggtctga

SEQ ID NO: 63221 - RNA, 22 nt, Synthetic Construct
  source 1..22: mol_type = other RNA
tagcagcgcgtaaatattggcg

SEQ ID NO: 63222 - RNA, 20 nt, Synthetic Construct
  source 1..20: mol_type = other RNA
tgaggtagtaggttgtgcgg

SEQ ID NO: 63223 - RNA, 33 nt, Synthetic Construct; identical to SEQ ID NO: 4947
  source 1..33: mol_type = other RNA

SEQ ID NO: 63224 - RNA, 33 nt, Synthetic Construct; identical to SEQ ID NO: 4947
  source 1..33: mol_type = other RNA

SEQ ID NO: 63225 - RNA, 22 nt, Synthetic Construct
  source 1..22: mol_type = other RNA
tgaggtagtagattgtataatt

SEQ ID NO: 63226 - RNA, 22 nt, Synthetic Construct
  source 1..22: mol_type = other RNA
tgaggtagtagattgtataatt

SEQ ID NO: 63227 - RNA, 23 nt, Synthetic Construct
  source 1..23: mol_type = other RNA
ttccccttggggttgtaggacca

SEQ ID NO: 63228 - RNA, 23 nt, Synthetic Construct
  source 1..23: mol_type = other RNA
ttccccttggggttgtaggacca

SEQ ID NO: 63229 - RNA, 16 nt, Synthetic Construct
  source 1..16: mol_type = other RNA
gggtctgtagctcagt

SEQ ID NO: 63230 - RNA, 16 nt, Synthetic Construct
  source 1..16: mol_type = other RNA
gggtctgtagctcagt

SEQ ID NO: 63231 - RNA, 26 nt, Synthetic Construct
  source 1..26: mol_type = other RNA
ccccccactgctaatttgactggctt

SEQ ID NO: 63232 - RNA, 26 nt, Synthetic Construct
  source 1..26: mol_type = other RNA
ccccccactgctaatttgactggctt

SEQ ID NO: 63233 - RNA, 21 nt, Synthetic Construct
  source 1..21: mol_type = other RNA
cgaggtagtaggttgtatagt

SEQ ID NO: 63234 - RNA, 18 nt, Synthetic Construct
  source 1..18: mol_type = other RNA
tcagtagctcgaggaaaa

SEQ ID NO: 63235 - RNA, 22 nt, Synthetic Construct
  source 1..22: mol_type = other RNA
tgttgcacttgtcccggcctgt

SEQ ID NO: 63236 - RNA, 27 nt, Synthetic Construct
  source 1..27: mol_type = other RNA
ccctccactgctaaatttgactggctt

SEQ ID NO: 63237 - RNA, 27 nt, Synthetic Construct
  source 1..27: mol_type = other RNA
ccctccactgctaaatttgactggctt

SEQ ID NO: 63238 - RNA, 22 nt, Synthetic Construct
  source 1..22: mol_type = other RNA
tgaggtagtagattgtatggtt

SEQ ID NO: 63239 - RNA, 22 nt, Synthetic Construct
  source 1..22: mol_type = other RNA
tgaggtagtagattgtatggtt

SEQ ID NO: 63240 - RNA, 28 nt, Synthetic Construct
  source 1..28: mol_type = other RNA
ccccccactgctaaatttggctggcttt

SEQ ID NO: 63241 - RNA, 23 nt, Synthetic Construct
  source 1..23: mol_type = other RNA
tgaggtaggaggttgtatagttg

SEQ ID NO: 63242 - RNA, 22 nt, Synthetic Construct
  source 1..22: mol_type = other RNA
tattgcacttgtcctggcctgt

SEQ ID NO: 63243 - RNA, 22 nt, Synthetic Construct
  source 1..22: mol_type = other RNA
tattgcacttgtcctggcctgt

SEQ ID NO: 63244 - RNA, 24 nt, Synthetic Construct
  source 1..24: mol_type = other RNA
atcacattgccagggattaccact

SEQ ID NO: 63245 - RNA, 24 nt, Synthetic Construct
  source 1..24: mol_type = other RNA
atcacattgccagggattaccact

SEQ ID NO: 63246 - RNA, 23 nt, Synthetic Construct
  source 1..23: mol_type = other RNA
agcaggacggtggccatggaagt

SEQ ID NO: 63247 - RNA, 23 nt, Synthetic Construct
  source 1..23: mol_type = other RNA
tcctgtactgagctgccacgaga

SEQ ID NO: 63248 - RNA, 23 nt, Synthetic Construct
  source 1..23: mol_type = other RNA
tcctgtactgagctgccacgaga

SEQ ID NO: 63249 - RNA, 29 nt, Synthetic Construct
  source 1..29: mol_type = other RNA
cccccccactgctaaatttgactggctta

SEQ ID NO: 63250 - RNA, 29 nt, Synthetic Construct
  source 1..29: mol_type = other RNA
cccccccactgctaaatttgactggctta

SEQ ID NO: 63251 - RNA, 17 nt, Synthetic Construct
  source 1..17: mol_type = other RNA
tggccgttcttagttgg

SEQ ID NO: 63252 - RNA, 20 nt, Synthetic Construct
  source 1..20: mol_type = other RNA
gcatggccgttcttagttgg

SEQ ID NO: 63253 - RNA, 24 nt, Synthetic Construct
  source 1..24: mol_type = other RNA
tgtcagtttgtcaaataccccaat

SEQ ID NO: 63254 - RNA, 20 nt, Synthetic Construct
  source 1..20: mol_type = other RNA
cgcatcccctagggcattgg

SEQ ID NO: 63255 - RNA, 20 nt, Synthetic Construct
  source 1..20: mol_type = other RNA
cgcatcccctagggcattgg

SEQ ID NO: 63256 - RNA, 22 nt, Synthetic Construct
  source 1..22: mol_type = other RNA
accacagggtagaaccacggaa

SEQ ID NO: 63257 - RNA, 22 nt, Synthetic Construct
  source 1..22: mol_type = other RNA
accacagggtagaaccacggaa

SEQ ID NO: 63258 - RNA, 22 nt, Synthetic Construct
  source 1..22: mol_type = other RNA
cgaggtagtagtttgtgctgtt

SEQ ID NO: 63259 - RNA, 15 nt, Synthetic Construct
  source 1..15: mol_type = other RNA
acctgcatcgagggt

SEQ ID NO: 63260 - RNA, 22 nt, Synthetic Construct
  source 1..22: mol_type = other RNA
tgtggtgtttcctactttatgg

SEQ ID NO: 63261 - RNA, 16 nt, Synthetic Construct
  source 1..16: mol_type = other RNA
gggaacgtgagctggg

SEQ ID NO: 63262 - RNA, 16 nt, Synthetic Construct
  source 1..16: mol_type = other RNA
gggaacgtgagctggg

SEQ ID NO: 63263 - RNA, 22 nt, Synthetic Construct
  source 1..22: mol_type = other RNA
tcgcaccgtgagtaataatgcg

SEQ ID NO: 63264 - RNA, 22 nt, Synthetic Construct
  source 1..22: mol_type = other RNA
tcgcaccgtgagtaataatgcg

SEQ ID NO: 63265 - RNA, 23 nt, Synthetic Construct
  source 1..23: mol_type = other RNA
agcagcactgtacagggctatga

SEQ ID NO: 63266 - RNA, 23 nt, Synthetic Construct
  source 1..23: mol_type = other RNA
agcagcactgtacagggctatga

SEQ ID NO: 63267 - RNA, 20 nt, Synthetic Construct
  source 1..20: mol_type = other RNA
agaggtagtaggttgtgtgg

SEQ ID NO: 63268 - RNA, 22 nt, Synthetic Construct
  source 1..22: mol_type = other RNA
tcagtgcatcacagaactttgt

SEQ ID NO: 63269 - RNA, 26 nt, Synthetic Construct
  source 1..26: mol_type = other RNA
aatgacacgatcactcccgttgagtt

SEQ ID NO: 63270 - RNA, 21 nt, Synthetic Construct
  source 1..21: mol_type = other RNA
tcctgtgctgagctgccccga

SEQ ID NO: 63271 - RNA, 23 nt, Synthetic Construct
  source 1..23: mol_type = other RNA
agcagcatcgtacagggctatga

SEQ ID NO: 63272 - RNA, 23 nt, Synthetic Construct
  source 1..23: mol_type = other RNA
agcagcatcgtacagggctatga

SEQ ID NO: 63273 - RNA, 21 nt, Synthetic Construct
  source 1..21: mol_type = other RNA
tgaggtagtaggttgtgaggt

SEQ ID NO: 63274 - RNA, 23 nt, Synthetic Construct
  source 1..23: mol_type = other RNA
tggtaaaacgacgtacttagtgt

SEQ ID NO: 63275 - RNA, 23 nt, Synthetic Construct
  source 1..23: mol_type = other RNA
tggtaaaacgacgtacttagtgt

SEQ ID NO: 63276 - RNA, 23 nt, Synthetic Construct
  source 1..23: mol_type = other RNA
tggtaatacgacgtacttagtgc

SEQ ID NO: 63277 - RNA, 23 nt, Synthetic Construct
  source 1..23: mol_type = other RNA
attctaatttctccacgtctttg

SEQ ID NO: 63278 - RNA, 23 nt, Synthetic Construct
  source 1..23: mol_type = other RNA
attctaatttctccacgtctttg

SEQ ID NO: 63279 - RNA, 38 nt, Synthetic Construct; identical to SEQ ID NO: 1537
  source 1..38: mol_type = other RNA

SEQ ID NO: 63280 - RNA, 38 nt, Synthetic Construct; identical to SEQ ID NO: 1537
  source 1..38: mol_type = other RNA

SEQ ID NO: 63281 - RNA, 23 nt, Synthetic Construct
  source 1..23: mol_type = other RNA
tgaggtagtagtttgtgctgttg

SEQ ID NO: 63282 - RNA, 23 nt, Synthetic Construct
  source 1..23: mol_type = other RNA
tgaggggcagagagcgagacttg

SEQ ID NO: 63283 - RNA, 23 nt, Synthetic Construct
  source 1..23: mol_type = other RNA
tgaggggcagagagcgagacttg

SEQ ID NO: 63284 - RNA, 21 nt, Synthetic Construct
  source 1..21: mol_type = other RNA
agtaccgtgagtaataatgcg

SEQ ID NO: 63285 - RNA, 22 nt, Synthetic Construct
  source 1..22: mol_type = other RNA
tcgtaccgtgagtaataatgca

SEQ ID NO: 63286 - RNA, 22 nt, Synthetic Construct
  source 1..22: mol_type = other RNA
tcgtaccgtgagtaataatgca

SEQ ID NO: 63287 - RNA, 17 nt, Synthetic Construct
  source 1..17: mol_type = other RNA
gggtctgtagctcagtc

SEQ ID NO: 63288 - RNA, 27 nt, Synthetic Construct
  source 1..27: mol_type = other RNA
cctcccactgctaaatttgactggctt

SEQ ID NO: 63289 - RNA, 27 nt, Synthetic Construct
  source 1..27: mol_type = other RNA
cctcccactgctaaatttgactggctt

SEQ ID NO: 63290 - RNA, 24 nt, Synthetic Construct
  source 1..24: mol_type = other RNA
caacggaatcccaaaagcagcttt

SEQ ID NO: 63291 - RNA, 24 nt, Synthetic Construct
  source 1..24: mol_type = other RNA
caacggaatcccaaaagcagcttt

SEQ ID NO: 63292 - RNA, 17 nt, Synthetic Construct
  source 1..17: mol_type = other RNA
gaagcggggctgggcgc

SEQ ID NO: 63293 - RNA, 17 nt, Synthetic Construct
  source 1..17: mol_type = other RNA
gaagcggggctgggcgc

SEQ ID NO: 63294 - RNA, 35 nt, Synthetic Construct; identical to SEQ ID NO: 25
  source 1..35: mol_type = other RNA

SEQ ID NO: 63295 - RNA, 24 nt, Synthetic Construct
  source 1..24: mol_type = other RNA
acctggcatacaatgtagatttct

SEQ ID NO: 63296 - RNA, 24 nt, Synthetic Construct
  source 1..24: mol_type = other RNA
acctggcatacaatgtagatttct

SEQ ID NO: 63297 - RNA, 20 nt, Synthetic Construct
  source 1..20: mol_type = other RNA
aacattcaacgctgtcggtg

SEQ ID NO: 63298 - RNA, 20 nt, Synthetic Construct
  source 1..20: mol_type = other RNA
aacattcaacgctgtcggtg

SEQ ID NO: 63299 - RNA, 16 nt, Synthetic Construct
  source 1..16: mol_type = other RNA
gtctacggccacacca

SEQ ID NO: 63300 - RNA, 20 nt, Synthetic Construct
  source 1..20: mol_type = other RNA
ttggcctcaagtcaggcagg

SEQ ID NO: 63301 - RNA, 21 nt, Synthetic Construct
  source 1..21: mol_type = other RNA
tggaatgtaaagaagtatgta

SEQ ID NO: 63302 - RNA, 25 nt, Synthetic Construct
  source 1..25: mol_type = other RNA
ttgagggtatgagatcgagacgaca

SEQ ID NO: 63303 - RNA, 25 nt, Synthetic Construct
  source 1..25: mol_type = other RNA
ttgagggtatgagatcgagacgaca

SEQ ID NO: 63304 - RNA, 22 nt, Synthetic Construct
  source 1..22: mol_type = other RNA
tgaggtagtagtttgtgcagtt

SEQ ID NO: 63305 - RNA, 21 nt, Synthetic Construct
  source 1..21: mol_type = other RNA
tgaggcagtaggttgtatagt

SEQ ID NO: 63306 - RNA, 20 nt, Synthetic Construct
  source 1..20: mol_type = other RNA
gggttcgattccggagaggg

SEQ ID NO: 63307 - RNA, 20 nt, Synthetic Construct
  source 1..20: mol_type = other RNA
gggttcgattccggagaggg

SEQ ID NO: 63308 - RNA, 19 nt, Synthetic Construct
  source 1..19: mol_type = other RNA
cacatgcaagtcgaacggt

SEQ ID NO: 63309 - RNA, 19 nt, Synthetic Construct
  source 1..19: mol_type = other RNA
cacatgcaagtcgaacggt

SEQ ID NO: 63310 - RNA, 23 nt, Synthetic Construct
  source 1..23: mol_type = other RNA
cagagttctacagtccgacgatc

SEQ ID NO: 63311 - RNA, 23 nt, Synthetic Construct
  source 1..23: mol_type = other RNA
cagagttctacagtccgacgatc

SEQ ID NO: 63312 - RNA, 24 nt, Synthetic Construct
  source 1..24: mol_type = other RNA
tgtaaacatcaccgactggaagct

SEQ ID NO: 63313 - RNA, 24 nt, Synthetic Construct
  source 1..24: mol_type = other RNA
tgtaaacatcaccgactggaagct

SEQ ID NO: 63314 - RNA, 16 nt, Synthetic Construct
  source 1..16: mol_type = other RNA
tcgtgacgatagtgca

SEQ ID NO: 63315 - RNA, 16 nt, Synthetic Construct
  source 1..16: mol_type = other RNA
tcgtgacgatagtgca

SEQ ID NO: 63316 - RNA, 22 nt, Synthetic Construct
  source 1..22: mol_type = other RNA
tgttgcacttgtcccggcctgt

SEQ ID NO: 63317 - RNA, 22 nt, Synthetic Construct
  source 1..22: mol_type = other RNA
tgttgcacttgtcccggcctgt

SEQ ID NO: 63318 - RNA, 21 nt, Synthetic Construct
  source 1..21: mol_type = other RNA
cataattacttttggtacgcg

SEQ ID NO: 63319 - RNA, 21 nt, Synthetic Construct
  source 1..21: mol_type = other RNA
cataattacttttggtacgcg

SEQ ID NO: 63320 - RNA, 27 nt, Synthetic Construct
  source 1..27: mol_type = other RNA
ccccccactgctgaatttgactggctt

SEQ ID NO: 63321 - RNA, 20 nt, Synthetic Construct
  source 1..20: mol_type = other RNA
tgaggtagtaggctgtgtgg

SEQ ID NO: 63322 - RNA, 23 nt, Synthetic Construct
  source 1..23: mol_type = other RNA
caaagtgctgttcgtgcaggtgg

SEQ ID NO: 63323 - RNA, 21 nt, Synthetic Construct
  source 1..21: mol_type = other RNA
ctggccctctctgcccttccg

SEQ ID NO: 63324 - RNA, 24 nt, Synthetic Construct
  source 1..24: mol_type = other RNA
acagtagtctgcacattggttatt

SEQ ID NO: 63325 - RNA, 28 nt, Synthetic Construct
  source 1..28: mol_type = other RNA
ccccccactgctaaatttgaccggcttt

SEQ ID NO: 63326 - RNA, 28 nt, Synthetic Construct
  source 1..28: mol_type = other RNA
ccccccactgctaaatttgaccggcttt

SEQ ID NO: 63327 - RNA, 24 nt, Synthetic Construct
  source 1..24: mol_type = other RNA
gactcttagcggtggatcactcgg

SEQ ID NO: 63328 - RNA, 24 nt, Synthetic Construct
  source 1..24: mol_type = other RNA
gactcttagcggtggatcactcgg

SEQ ID NO: 63329 - RNA, 22 nt, Synthetic Construct
  source 1..22: mol_type = other RNA
tgaggtagtgggttgtatagtt

SEQ ID NO: 63330 - RNA, 23 nt, Synthetic Construct
  source 1..23: mol_type = other RNA
tgaggggcagagagcgagacttt

SEQ ID NO: 63331 - RNA, 24 nt, Synthetic Construct
  source 1..24: mol_type = other RNA
cgtgtatttgacaagctgagttgg

SEQ ID NO: 63332 - RNA, 22 nt, Synthetic Construct
  source 1..22: mol_type = other RNA
agtggggaacccttccatgagg

SEQ ID NO: 63333 - RNA, 34 nt, Synthetic Construct; identical to SEQ ID NO: 1526
  source 1..34: mol_type = other RNA

SEQ ID NO: 63334 - RNA, 22 nt, Synthetic Construct
  source 1..22: mol_type = other RNA
tgaggtaatagtttgtgctgtt

SEQ ID NO: 63335 - RNA, 24 nt, Synthetic Construct
  source 1..24: mol_type = other RNA
aggaagccctggaggggctggagg

SEQ ID NO: 63336 - RNA, 24 nt, Synthetic Construct
  source 1..24: mol_type = other RNA
aggaagccctggaggggctggagg

SEQ ID NO: 63337 - RNA, 22 nt, Synthetic Construct
  source 1..22: mol_type = other RNA
agtagtgtttcctactttatgg

SEQ ID NO: 63338 - RNA, 22 nt, Synthetic Construct
  source 1..22: mol_type = other RNA
ctccctcgggagggcgcgcggg

SEQ ID NO: 63339 - RNA, 21 nt, Synthetic Construct
  source 1..21: mol_type = other RNA
cgaggtagtaggttgtgtggt

SEQ ID NO: 63340 - RNA, 35 nt, Synthetic Construct; identical to SEQ ID NO: 1095
  source 1..35: mol_type = other RNA

SEQ ID NO: 63341 - RNA, 35 nt, Synthetic Construct; identical to SEQ ID NO: 1095
  source 1..35: mol_type = other RNA

SEQ ID NO: 63342 - RNA, 20 nt, Synthetic Construct
  source 1..20: mol_type = other RNA
tagcagcacataatggtttg

SEQ ID NO: 63343 - RNA, 19 nt, Synthetic Construct
  source 1..19: mol_type = other RNA
tggagtgtgacaatggtgt

SEQ ID NO: 63344 - RNA, 23 nt, Synthetic Construct
  source 1..23: mol_type = other RNA
tgagaactgaattccatgggttg

SEQ ID NO: 63345 - RNA, 23 nt, Synthetic Construct
  source 1..23: mol_type = other RNA
tgagaactgaattccatgggttg

SEQ ID NO: 63346 - RNA, 22 nt, Synthetic Construct
  source 1..22: mol_type = other RNA
cataaagtagaaagcactacta

SEQ ID NO: 63347 - RNA, 21 nt, Synthetic Construct
  source 1..21: mol_type = other RNA
tctcccaacccttgtaccagt

SEQ ID NO: 63348 - RNA, 21 nt, Synthetic Construct
  source 1..21: mol_type = other RNA
tctcccaacccttgtaccagt

SEQ ID NO: 63349 - RNA, 20 nt, Synthetic Construct
  source 1..20: mol_type = other RNA
tgaggtagtaggttgcatag

SEQ ID NO: 63350 - RNA, 21 nt, Synthetic Construct
  source 1..21: mol_type = other RNA
tcctgtactgagctgccccaa

SEQ ID NO: 63351 - RNA, 22 nt, Synthetic Construct
  source 1..22: mol_type = other RNA
tactgcacttgtcccggcctgt

SEQ ID NO: 63352 - RNA, 19 nt, Synthetic Construct
  source 1..19: mol_type = other RNA
tagtgacgcgcatgaatgg

SEQ ID NO: 63353 - RNA, 19 nt, Synthetic Construct
  source 1..19: mol_type = other RNA
tagtgacgcgcatgaatgg

SEQ ID NO: 63354 - RNA, 22 nt, Synthetic Construct
  source 1..22: mol_type = other RNA
tgaggtagaagattgtatagtt

SEQ ID NO: 63355 - RNA, 22 nt, Synthetic Construct
  source 1..22: mol_type = other RNA
tgaggtagaagattgtatagtt

SEQ ID NO: 63356 - RNA, 33 nt, Synthetic Construct; identical to SEQ ID NO: 56504
  source 1..33: mol_type = other RNA

SEQ ID NO: 63357 - RNA, 24 nt, Synthetic Construct
  source 1..24: mol_type = other RNA
tgtaaacatccccgaccggaagct

SEQ ID NO: 63358 - RNA, 19 nt, Synthetic Construct
  source 1..19: mol_type = other RNA
agtaggtcatcgtcaggct

SEQ ID NO: 63359 - RNA, 19 nt, Synthetic Construct
  source 1..19: mol_type = other RNA
agtaggtcatcgtcaggct

SEQ ID NO: 63360 - RNA, 22 nt, Synthetic Construct
  source 1..22: mol_type = other RNA
tacagtagtctgcacattggtt

SEQ ID NO: 63361 - RNA, 21 nt, Synthetic Construct
  source 1..21: mol_type = other RNA
tggagtgtgacaatggtgtta

SEQ ID NO: 63362 - RNA, 21 nt, Synthetic Construct
  source 1..21: mol_type = other RNA
actcggcgtggcgtcggtcgt

SEQ ID NO: 63363 - RNA, 23 nt, Synthetic Construct
  source 1..23: mol_type = other RNA
tgagaactgaattccatgggtta

SEQ ID NO: 63364 - RNA, 22 nt, Synthetic Construct
  source 1..22: mol_type = other RNA
tagcagcacataaatattggcg

SEQ ID NO: 63365 - RNA, 22 nt, Synthetic Construct
  source 1..22: mol_type = other RNA
tagcagcacataaatattggcg

SEQ ID NO: 63366 - RNA, 23 nt, Synthetic Construct
  source 1..23: mol_type = other RNA
tcctgtactgagttgccccgaga

SEQ ID NO: 63367 - RNA, 23 nt, Synthetic Construct
  source 1..23: mol_type = other RNA
agctacattgtctgctgggtttt

SEQ ID NO: 63368 - RNA, 22 nt, Synthetic Construct
  source 1..22: mol_type = other RNA
tgaggtagtaggttgcatagtt

SEQ ID NO: 63369 - RNA, 22 nt, Synthetic Construct
  source 1..22: mol_type = other RNA
tgaggtagtaggttgcatagtt

SEQ ID NO: 63370 - RNA, 35 nt, Synthetic Construct; identical to SEQ ID NO: 757
  source 1..35: mol_type = other RNA

SEQ ID NO: 63371 - RNA, 27 nt, Synthetic Construct
  source 1..27: mol_type = other RNA
ccccccgctgctaaatttgactggcta

SEQ ID NO: 63372 - RNA, 35 nt, Synthetic Construct; identical to SEQ ID NO: 9871
  source 1..35: mol_type = other RNA

SEQ ID NO: 63373 - RNA, 22 nt, Synthetic Construct
  source 1..22: mol_type = other RNA
taactccttaggcgaatctcgc

SEQ ID NO: 63374 - RNA, 22 nt, Synthetic Construct
  source 1..22: mol_type = other RNA
taactccttaggcgaatctcgc

SEQ ID NO: 63375 - RNA, 24 nt, Synthetic Construct
  source 1..24: mol_type = other RNA
caaagtgctgttcgtgcaggtaga

SEQ ID NO: 63376 - RNA, 24 nt, Synthetic Construct
  source 1..24: mol_type = other RNA
tgaggtagtaggttgtatagttaa

SEQ ID NO: 63377 - RNA, 23 nt, Synthetic Construct
  source 1..23: mol_type = other RNA
tggtaatacgacgtgcttagtgt

SEQ ID NO: 63378 - RNA, 27 nt, Synthetic Construct
  source 1..27: mol_type = other RNA
gctttacattggactttgaacagatct

SEQ ID NO: 63379 - RNA, 27 nt, Synthetic Construct
  source 1..27: mol_type = other RNA
gctttacattggactttgaacagatct

SEQ ID NO: 63380 - RNA, 29 nt, Synthetic Construct
  source 1..29: mol_type = other RNA
gcgccgctggtgtagtggtatcatgcaag

SEQ ID NO: 63381 - RNA, 29 nt, Synthetic Construct
  source 1..29: mol_type = other RNA
gcgccgctggtgtagtggtatcatgcaag

SEQ ID NO: 63382 - RNA, 23 nt, Synthetic Construct
  source 1..23: mol_type = other RNA
gggagccaggaagtattgatgtt

SEQ ID NO: 63383 - RNA, 23 nt, Synthetic Construct
  source 1..23: mol_type = other RNA
gggagccaggaagtattgatgtt

SEQ ID NO: 63384 - RNA, 22 nt, Synthetic Construct
  source 1..22: mol_type = other RNA
tagcagcacgtaaatattgacg

SEQ ID NO: 63385 - RNA, 16 nt, Synthetic Construct
  source 1..16: mol_type = other RNA
gtctacggccatacta

SEQ ID NO: 63386 - RNA, 16 nt, Synthetic Construct
  source 1..16: mol_type = other RNA
gtctacggccatacta

SEQ ID NO: 63387 - RNA, 22 nt, Synthetic Construct
  source 1..22: mol_type = other RNA
tgaggtagaagtttgtgctgtt

SEQ ID NO: 63388 - RNA, 22 nt, Synthetic Construct
  source 1..22: mol_type = other RNA
tgaggtagaagtttgtgctgtt

SEQ ID NO: 63389 - RNA, 22 nt, Synthetic Construct
  source 1..22: mol_type = other RNA
tccaagtaatccaggataggct

SEQ ID NO: 63390 - RNA, 21 nt, Synthetic Construct
  source 1..21: mol_type = other RNA
taactccttaagcgaatccgc

SEQ ID NO: 63391 - RNA, 21 nt, Synthetic Construct
  source 1..21: mol_type = other RNA
taactccttaagcgaatccgc

SEQ ID NO: 63392 - RNA, 23 nt, Synthetic Construct
  source 1..23: mol_type = other RNA
ttatggtttgcctgggactgagt

SEQ ID NO: 63393 - RNA, 22 nt, Synthetic Construct
  source 1..22: mol_type = other RNA
tggggtagtagattgtatagtt

SEQ ID NO: 63394 - RNA, 22 nt, Synthetic Construct
  source 1..22: mol_type = other RNA
tggggtagtagattgtatagtt

SEQ ID NO: 63395 - RNA, 28 nt, Synthetic Construct
  source 1..28: mol_type = other RNA
ccccccactgctaaatttggctggcttt

SEQ ID NO: 63396 - RNA, 23 nt, Synthetic Construct
  source 1..23: mol_type = other RNA
tcccacatggtctagcggttagg

SEQ ID NO: 63397 - RNA, 34 nt, Synthetic Construct; identical to SEQ ID NO: 35301
  source 1..34: mol_type = other RNA

SEQ ID NO: 63398 - RNA, 22 nt, Synthetic Construct
  source 1..22: mol_type = other RNA
gcagtagtctgcacattggtta

SEQ ID NO: 63399 - RNA, 22 nt, Synthetic Construct
  source 1..22: mol_type = other RNA
tagctgcacgtaaatattggcg

SEQ ID NO: 63400 - RNA, 22 nt, Synthetic Construct
  source 1..22: mol_type = other RNA
tagctgcacgtaaatattggcg

SEQ ID NO: 63401 - RNA, 25 nt, Synthetic Construct
  source 1..25: mol_type = other RNA
tagtgcaatattgcttatagggttt

SEQ ID NO: 63402 - RNA, 25 nt, Synthetic Construct
  source 1..25: mol_type = other RNA
tagtgcaatattgcttatagggttt

SEQ ID NO: 63403 - RNA, 21 nt, Synthetic Construct
  source 1..21: mol_type = other RNA
cgtaccgtgagtaataaagcg

SEQ ID NO: 63404 - RNA, 22 nt, Synthetic Construct
  source 1..22: mol_type = other RNA
tgaggtagtaggttgtatagtg

SEQ ID NO: 63405 - RNA, 22 nt, Synthetic Construct
  source 1..22: mol_type = other RNA
tgaggtagtaggttgtatagtg

SEQ ID NO: 63406 - RNA, 23 nt, Synthetic Construct
  source 1..23: mol_type = other RNA
atgacacgatcactcccgttgag

SEQ ID NO: 63407 - RNA, 23 nt, Synthetic Construct
  source 1..23: mol_type = other RNA
atgacacgatcactcccgttgag

SEQ ID NO: 63408 - RNA, 23 nt, Synthetic Construct
  source 1..23: mol_type = other RNA
tggagtgtgacaatggtgtttgg

SEQ ID NO: 63409 - RNA, 28 nt, Synthetic Construct
  source 1..28: mol_type = other RNA
ccccccactgctaaatttgaccggcttt

SEQ ID NO: 63410 - RNA, 28 nt, Synthetic Construct
  source 1..28: mol_type = other RNA
ccccccactgctaaatttgaccggcttt

SEQ ID NO: 63411 - RNA, 24 nt, Synthetic Construct
  source 1..24: mol_type = other RNA
tttggcaatggtagaactcacact

SEQ ID NO: 63412 - RNA, 24 nt, Synthetic Construct
  source 1..24: mol_type = other RNA
tttggcaatggtagaactcacact

SEQ ID NO: 63413 - RNA, 21 nt, Synthetic Construct
  source 1..21: mol_type = other RNA
tgaggtagtaggtcgtgtggt

SEQ ID NO: 63414 - RNA, 20 nt, Synthetic Construct
  source 1..20: mol_type = other RNA
tacagtactgtgataactga

SEQ ID NO: 63415 - RNA, 20 nt, Synthetic Construct
  source 1..20: mol_type = other RNA
tacagtactgtgataactga

SEQ ID NO: 63416 - RNA, 22 nt, Synthetic Construct
  source 1..22: mol_type = other RNA
tcccactgcttcacttgactag

SEQ ID NO: 63417 - RNA, 22 nt, Synthetic Construct
  source 1..22: mol_type = other RNA
tcccactgcttcacttgactag

SEQ ID NO: 63418 - RNA, 18 nt, Synthetic Construct
  source 1..18: mol_type = other RNA
aaccgggcggaaacacca

SEQ ID NO: 63419 - RNA, 16 nt, Synthetic Construct
  source 1..16: mol_type = other RNA
cccaaaggtcgtcggt

SEQ ID NO: 63420 - RNA, 16 nt, Synthetic Construct
  source 1..16: mol_type = other RNA
cccaaaggtcgtcggt

SEQ ID NO: 63421 - RNA, 21 nt, Synthetic Construct
  source 1..21: mol_type = other RNA
tagcttatcagactgatgttg

SEQ ID NO: 63422 - RNA, 20 nt, Synthetic Construct
  source 1..20: mol_type = other RNA
tgaagtagtaggttgtgtgg

SEQ ID NO: 63423 - RNA, 22 nt, Synthetic Construct
  source 1..22: mol_type = other RNA
tctttgttcgattccgttgagt

SEQ ID NO: 63424 - RNA, 22 nt, Synthetic Construct
  source 1..22: mol_type = other RNA
tctttgttcgattccgttgagt

SEQ ID NO: 63425 - RNA, 31 nt, Synthetic Construct; identical to SEQ ID NO: 7160
  source 1..31: mol_type = other RNA

SEQ ID NO: 63426 - RNA, 21 nt, Synthetic Construct
  source 1..21: mol_type = other RNA
tgtaacagcaactccatgtgg

SEQ ID NO: 63427 - RNA, 20 nt, Synthetic Construct
  source 1..20: mol_type = other RNA
tctcccaacccttgtaccag

SEQ ID NO: 63428 - RNA, 20 nt, Synthetic Construct
  source 1..20: mol_type = other RNA
tctcccaacccttgtaccag

SEQ ID NO: 63429 - RNA, 21 nt, Synthetic Construct
  source 1..21: mol_type = other RNA
tgaggtagtaggctgtatagt

SEQ ID NO: 63430 - RNA, 21 nt, Synthetic Construct
  source 1..21: mol_type = other RNA
tgaggtagtaagttgtgtggt

SEQ ID NO: 63431 - RNA, 20 nt, Synthetic Construct
  source 1..20: mol_type = other RNA
tgaggtagtaggttgtgtgt

SEQ ID NO: 63432 - RNA, 20 nt, Synthetic Construct
  source 1..20: mol_type = other RNA
tgaggtagtaggttgtgtgt

SEQ ID NO: 63433 - RNA, 20 nt, Synthetic Construct
  source 1..20: mol_type = other RNA
caaagaattctccttttggg

SEQ ID NO: 63434 - RNA, 20 nt, Synthetic Construct
  source 1..20: mol_type = other RNA
caaagaattctccttttggg

SEQ ID NO: 63435 - RNA, 27 nt, Synthetic Construct
  source 1..27: mol_type = other RNA
ccccccactgctaaatttgactggcct

SEQ ID NO: 63436 - RNA, 27 nt, Synthetic Construct
  source 1..27: mol_type = other RNA
ccccccactgctaaatttgactggcct

SEQ ID NO: 63437 - RNA, 27 nt, Synthetic Construct
  source 1..27: mol_type = other RNA
ccccccactgctaaatttggctggctt

SEQ ID NO: 63438 - RNA, 27 nt, Synthetic Construct
  source 1..27: mol_type = other RNA
ccccccactgctaaatttggctggctt

SEQ ID NO: 63439 - RNA, 21 nt, Synthetic Construct
  source 1..21: mol_type = other RNA
ctagactgaagccccttgagg

SEQ ID NO: 63440 - RNA, 21 nt, Synthetic Construct
  source 1..21: mol_type = other RNA
ctagactgaagccccttgagg

SEQ ID NO: 63441 - RNA, 22 nt, Synthetic Construct
  source 1..22: mol_type = other RNA
nagcagcacgtaaatattggcg

SEQ ID NO: 63442 - RNA, 22 nt, Synthetic Construct
  source 1..22: mol_type = other RNA
nagcagcacgtaaatattggcg

SEQ ID NO: 63443 - RNA, 21 nt, Synthetic Construct
  source 1..21: mol_type = other RNA
tgaggtagtgggttgtatagt

SEQ ID NO: 63444 - RNA, 15 nt, Synthetic Construct
  source 1..15: mol_type = other RNA
ggccgtcgtcagctc

SEQ ID NO: 63445 - RNA, 15 nt, Synthetic Construct
  source 1..15: mol_type = other RNA
ggccgtcgtcagctc

SEQ ID NO: 63446 - RNA, 22 nt, Synthetic Construct
  source 1..22: mol_type = other RNA
tgagagctgaattccatgggtt

SEQ ID NO: 63447 - RNA, 23 nt, Synthetic Construct
  source 1..23: mol_type = other RNA
tgaggtaggaggttgtatagttt

SEQ ID NO: 63448 - RNA, 22 nt, Synthetic Construct
  source 1..22: mol_type = other RNA
cgactggtaactgggatgaagt

SEQ ID NO: 63449 - RNA, 22 nt, Synthetic Construct
  source 1..22: mol_type = other RNA
cgactggtaactgggatgaagt

SEQ ID NO: 63450 - RNA, 25 nt, Synthetic Construct
  source 1..25: mol_type = other RNA
caaagaattctccttttgggctttt

SEQ ID NO: 63451 - RNA, 22 nt, Synthetic Construct
  source 1..22: mol_type = other RNA
tcctgtactgagctgacccgag

SEQ ID NO: 63452 - RNA, 22 nt, Synthetic Construct
  source 1..22: mol_type = other RNA
tcctgtactgagctgacccgag

SEQ ID NO: 63453 - RNA, 25 nt, Synthetic Construct
  source 1..25: mol_type = other RNA
agcagcattgtacagggctatgatt

SEQ ID NO: 63454 - RNA, 25 nt, Synthetic Construct
  source 1..25: mol_type = other RNA
agcagcattgtacagggctatgatt

SEQ ID NO: 63455 - RNA, 21 nt, Synthetic Construct
  source 1..21: mol_type = other RNA
tgaggtagtaagttgtgtggt

SEQ ID NO: 63456 - RNA, 21 nt, Synthetic Construct
  source 1..21: mol_type = other RNA
tatgtcccacccccactcctg

SEQ ID NO: 63457 - RNA, 23 nt, Synthetic Construct
  source 1..23: mol_type = other RNA
tcctgcactgagctgccccgagt

SEQ ID NO: 63458 - RNA, 22 nt, Synthetic Construct
  source 1..22: mol_type = other RNA
tgaggtagtaggttgagtggtt

SEQ ID NO: 63459 - RNA, 19 nt, Synthetic Construct
  source 1..19: mol_type = other RNA
tacagtatagatgatgtac

SEQ ID NO: 63460 - RNA, 19 nt, Synthetic Construct
  source 1..19: mol_type = other RNA
tacagtatagatgatgtac

SEQ ID NO: 63461 - RNA, 23 nt, Synthetic Construct
  source 1..23: mol_type = other RNA
tgatatgtttgatatattaggtt

SEQ ID NO: 63462 - RNA, 22 nt, Synthetic Construct
  source 1..22: mol_type = other RNA
aacggaatcccaaaagcagctg

SEQ ID NO: 63463 - RNA, 23 nt, Synthetic Construct
  source 1..23: mol_type = other RNA
tgaggtagtaggttgtgtggttt

SEQ ID NO: 63464 - RNA, 31 nt, Synthetic Construct; identical to SEQ ID NO: 14087
  source 1..31: mol_type = other RNA

SEQ ID NO: 63465 - RNA, 31 nt, Synthetic Construct; identical to SEQ ID NO: 14087
  source 1..31: mol_type = other RNA

SEQ ID NO: 63466 - RNA, 20 nt, Synthetic Construct
  source 1..20: mol_type = other RNA
tcccgggtttcggcaccatt

SEQ ID NO: 63467 - RNA, 20 nt, Synthetic Construct
  source 1..20: mol_type = other RNA
tcccgggtttcggcaccatt

SEQ ID NO: 63468 - RNA, 23 nt, Synthetic Construct
  source 1..23: mol_type = other RNA
agcagcattgtacagggctatct

SEQ ID NO: 63469 - RNA, 18 nt, Synthetic Construct
  source 1..18: mol_type = other RNA
gtcaggatggccgagcgg

SEQ ID NO: 63470 - RNA, 20 nt, Synthetic Construct
  source 1..20: mol_type = other RNA
tgaggtagtgggttgtatag

SEQ ID NO: 63471 - RNA, 22 nt, Synthetic Construct
  source 1..22: mol_type = other RNA
gtgccgaagctgtgggattgat

SEQ ID NO: 63472 - RNA, 22 nt, Synthetic Construct
  source 1..22: mol_type = other RNA
gtgccgaagctgtgggattgat

SEQ ID NO: 63473 - RNA, 21 nt, Synthetic Construct
  source 1..21: mol_type = other RNA
tcctgtactgagctgcccgag

SEQ ID NO: 63474 - RNA, 23 nt, Synthetic Construct
  source 1..23: mol_type = other RNA
tcctgtgctgagctgccccgaga

SEQ ID NO: 63475 - RNA, 23 nt, Synthetic Construct
  source 1..23: mol_type = other RNA
tgtgcaaatctatgcaaaactga

SEQ ID NO: 63476 - RNA, 23 nt, Synthetic Construct
  source 1..23: mol_type = other RNA
tgtgcaaatctatgcaaaactga

SEQ ID NO: 63477 - RNA, 23 nt, Synthetic Construct
  source 1..23: mol_type = other RNA
gtcagtttgtcaaataccccatt

SEQ ID NO: 63478 - RNA, 23 nt, Synthetic Construct
  source 1..23: mol_type = other RNA
gtcagtttgtcaaataccccatt

SEQ ID NO: 63479 - RNA, 23 nt, Synthetic Construct
  source 1..23: mol_type = other RNA
tcgaccggacctcgaccggctcg

SEQ ID NO: 63480 - RNA, 23 nt, Synthetic Construct
  source 1..23: mol_type = other RNA
tcgaccggacctcgaccggctcg

SEQ ID NO: 63481 - RNA, 22 nt, Synthetic Construct
  source 1..22: mol_type = other RNA
tagcagcacgaaaatattggcg

SEQ ID NO: 63482 - RNA, 22 nt, Synthetic Construct
  source 1..22: mol_type = other RNA
tagcagcacgaaaatattggcg

SEQ ID NO: 63483 - RNA, 16 nt, Synthetic Construct
  source 1..16: mol_type = other RNA
tcgtgacgatagtgca

SEQ ID NO: 63484 - RNA, 22 nt, Synthetic Construct
  source 1..22: mol_type = other RNA
tgtcagtttgtcaaatacccct

SEQ ID NO: 63485 - RNA, 22 nt, Synthetic Construct
  source 1..22: mol_type = other RNA
tgtcagtttgtcaaatacccct

SEQ ID NO: 63486 - RNA, 21 nt, Synthetic Construct
  source 1..21: mol_type = other RNA
tcctgcactgagctgccccga

SEQ ID NO: 63487 - RNA, 17 nt, Synthetic Construct
  source 1..17: mol_type = other RNA
tctgcctcagcgtcggt

SEQ ID NO: 63488 - RNA, 17 nt, Synthetic Construct
  source 1..17: mol_type = other RNA
tctgcctcagcgtcggt

SEQ ID NO: 63489 - RNA, 20 nt, Synthetic Construct
  source 1..20: mol_type = other RNA
tgaggcagtaggttgtgtgg

SEQ ID NO: 63490 - RNA, 22 nt, Synthetic Construct
  source 1..22: mol_type = other RNA
tagcagcacttaaatattggcg

SEQ ID NO: 63491 - RNA, 22 nt, Synthetic Construct
  source 1..22: mol_type = other RNA
tagcagcacttaaatattggcg

SEQ ID NO: 63492 - RNA, 24 nt, Synthetic Construct
  source 1..24: mol_type = other RNA
gaaagattaaggcaagaggttagc

SEQ ID NO: 63493 - RNA, 24 nt, Synthetic Construct
  source 1..24: mol_type = other RNA
gaaagattaaggcaagaggttagc

SEQ ID NO: 63494 - RNA, 22 nt, Synthetic Construct
  source 1..22: mol_type = other RNA
gcagtagtctgcacattggtta

SEQ ID NO: 63495 - RNA, 22 nt, Synthetic Construct
  source 1..22: mol_type = other RNA
gcagtagtctgcacattggtta

SEQ ID NO: 63496 - RNA, 23 nt, Synthetic Construct
  source 1..23: mol_type = other RNA
caaagtgctgtttgtgcaggtag

SEQ ID NO: 63497 - RNA, 25 nt, Synthetic Construct
  source 1..25: mol_type = other RNA
ttgaggatatgagatagagacgaca

SEQ ID NO: 63498 - RNA, 24 nt, Synthetic Construct
  source 1..24: mol_type = other RNA
tgaggtagtaggttgtgtggttga

SEQ ID NO: 63499 - RNA, 24 nt, Synthetic Construct
  source 1..24: mol_type = other RNA
tgaggtagtaggttgtgtggttga

SEQ ID NO: 63500 - RNA, 24 nt, Synthetic Construct
  source 1..24: mol_type = other RNA
tgaggtagtaggttgtatagttaa

SEQ ID NO: 63501 - RNA, 22 nt, Synthetic Construct
  source 1..22: mol_type = other RNA
tattgcacttatcccggcctgt

SEQ ID NO: 63502 - RNA, 22 nt, Synthetic Construct
  source 1..22: mol_type = other RNA
tattgcacttatcccggcctgt

SEQ ID NO: 63503 - RNA, 25 nt, Synthetic Construct
  source 1..25: mol_type = other RNA
tgtaaacatccttgactggaagctt

SEQ ID NO: 63504 - RNA, 25 nt, Synthetic Construct
  source 1..25: mol_type = other RNA
tgtaaacatccttgactggaagctt

SEQ ID NO: 63505 - RNA, 22 nt, Synthetic Construct
  source 1..22: mol_type = other RNA
cgtagtgtttcctactttatgg

SEQ ID NO: 63506 - RNA, 22 nt, Synthetic Construct
  source 1..22: mol_type = other RNA
tgaggtagtagattgtgtagtt

SEQ ID NO: 63507 - RNA, 23 nt, Synthetic Construct
  source 1..23: mol_type = other RNA
tcaggctcagtcccctcccgttt

SEQ ID NO: 63508 - RNA, 23 nt, Synthetic Construct
  source 1..23: mol_type = other RNA
tcaggctcagtcccctcccgttt

SEQ ID NO: 63509 - RNA, 22 nt, Synthetic Construct
  source 1..22: mol_type = other RNA
tgaggtagtagtttgtgctatt

SEQ ID NO: 63510 - RNA, 22 nt, Synthetic Construct
  source 1..22: mol_type = other RNA
gagagtaggacgttgccaggtt

SEQ ID NO: 63511 - RNA, 22 nt, Synthetic Construct
  source 1..22: mol_type = other RNA
gagagtaggacgttgccaggtt

SEQ ID NO: 63512 - RNA, 22 nt, Synthetic Construct
  source 1..22: mol_type = other RNA
taaggtagtaggttgtatagtt

SEQ ID NO: 63513 - RNA, 22 nt, Synthetic Construct
  source 1..22: mol_type = other RNA
taaggtagtaggttgtatagtt

SEQ ID NO: 63514 - RNA, 23 nt, Synthetic Construct
  source 1..23: mol_type = other RNA
tcctgaactgagctgccccgagt

SEQ ID NO: 63515 - RNA, 16 nt, Synthetic Construct
  source 1..16: mol_type = other RNA
ccctttgtacacaccg

SEQ ID NO: 63516 - RNA, 16 nt, Synthetic Construct
  source 1..16: mol_type = other RNA
ccctttgtacacaccg

SEQ ID NO: 63517 - RNA, 22 nt, Synthetic Construct
  source 1..22: mol_type = other RNA
caagtcactagtggttccgttt

SEQ ID NO: 63518 - RNA, 22 nt, Synthetic Construct
  source 1..22: mol_type = other RNA
caagtcactagtggttccgttt

SEQ ID NO: 63519 - RNA, 22 nt, Synthetic Construct
  source 1..22: mol_type = other RNA
aacggaatcccaaaagcagctg

SEQ ID NO: 63520 - RNA, 21 nt, Synthetic Construct
  source 1..21: mol_type = other RNA
tgaggtagtaggctgtatagt

SEQ ID NO: 63521 - RNA, 21 nt, Synthetic Construct
  source 1..21: mol_type = other RNA
tgaggtagtaggctgtatagt

SEQ ID NO: 63522 - RNA, 22 nt, Synthetic Construct
  source 1..22: mol_type = other RNA
cgaggtagtaggttgtatagtt

SEQ ID NO: 63523 - RNA, 35 nt, Synthetic Construct; identical to SEQ ID NO: 19298
  source 1..35: mol_type = other RNA

SEQ ID NO: 63524 - RNA, 35 nt, Synthetic Construct; identical to SEQ ID NO: 19298
  source 1..35: mol_type = other RNA

SEQ ID NO: 63525 - RNA, 21 nt, Synthetic Construct
  source 1..21: mol_type = other RNA
tgaagtagtaggttgtatagt

SEQ ID NO: 63526 - RNA, 23 nt, Synthetic Construct
  source 1..23: mol_type = other RNA
tggctcagttcagcaggaacaga

SEQ ID NO: 63527 - RNA, 23 nt, Synthetic Construct
  source 1..23: mol_type = other RNA
tggctcagttcagcaggaacaga

SEQ ID NO: 63528 - RNA, 23 nt, Synthetic Construct
  source 1..23: mol_type = other RNA
taccctgtagaaccgaatttgtg

SEQ ID NO: 63529 - RNA, 23 nt, Synthetic Construct
  source 1..23: mol_type = other RNA
taccctgtagaaccgaatttgtg

SEQ ID NO: 63530 - RNA, 20 nt, Synthetic Construct
  source 1..20: mol_type = other RNA
aacattcaacgctgtcggtg

SEQ ID NO: 63531 - RNA, 22 nt, Synthetic Construct
  source 1..22: mol_type = other RNA
tgtgcaaatctatgcaaaactg

SEQ ID NO: 63532 - RNA, 22 nt, Synthetic Construct
  source 1..22: mol_type = other RNA
tgtgcaaatctatgcaaaactg

SEQ ID NO: 63533 - RNA, 22 nt, Synthetic Construct
  source 1..22: mol_type = other RNA
tgaggtagtagtttgtgctatt

SEQ ID NO: 63534 - RNA, 22 nt, Synthetic Construct
  source 1..22: mol_type = other RNA
tgaggtagtagtttgtgctatt

SEQ ID NO: 63535 - RNA, 21 nt, Synthetic Construct
  source 1..21: mol_type = other RNA
ctagactgaagctccttgagg

SEQ ID NO: 63536 - RNA, 21 nt, Synthetic Construct
  source 1..21: mol_type = other RNA
ctagactgaagctccttgagg

SEQ ID NO: 63537 - RNA, 22 nt, Synthetic Construct
  source 1..22: mol_type = other RNA
gtccagttttcccaggaatccc

SEQ ID NO: 63538 - RNA, 22 nt, Synthetic Construct
  source 1..22: mol_type = other RNA
gtccagttttcccaggaatccc

SEQ ID NO: 63539 - RNA, 29 nt, Synthetic Construct
  source 1..29: mol_type = other RNA
gcgccgctggtgtagtggtatcatgcaag

SEQ ID NO: 63540 - RNA, 29 nt, Synthetic Construct
  source 1..29: mol_type = other RNA
gcgccgctggtgtagtggtatcatgcaag

SEQ ID NO: 63541 - RNA, 26 nt, Synthetic Construct
  source 1..26: mol_type = other RNA
tgaggtagtaggttgtgtggtttttt

SEQ ID NO: 63542 - RNA, 22 nt, Synthetic Construct
  source 1..22: mol_type = other RNA
tattgcacttgtcccgacctgt

SEQ ID NO: 63543 - RNA, 21 nt, Synthetic Construct
  source 1..21: mol_type = other RNA
tggagtgtgacagtggtgttt

SEQ ID NO: 63544 - RNA, 24 nt, Synthetic Construct
  source 1..24: mol_type = other RNA
agctacatctggctactgggtctc

SEQ ID NO: 63545 - RNA, 28 nt, Synthetic Construct
  source 1..28: mol_type = other RNA
tcccacatggtctagcggttaggattcc

SEQ ID NO: 63546 - RNA, 28 nt, Synthetic Construct
  source 1..28: mol_type = other RNA
tcccacatggtctagcggttaggattcc

SEQ ID NO: 63547 - RNA, 22 nt, Synthetic Construct
  source 1..22: mol_type = other RNA
tgaggtagtaggatgtatagtt

SEQ ID NO: 63548 - RNA, 23 nt, Synthetic Construct
  source 1..23: mol_type = other RNA
cagtgcaatagtattgtcaaagc

SEQ ID NO: 63549 - RNA, 23 nt, Synthetic Construct
  source 1..23: mol_type = other RNA
cagtgcaatagtattgtcaaagc

SEQ ID NO: 63550 - RNA, 22 nt, Synthetic Construct
  source 1..22: mol_type = other RNA
ttcaccaccttctccacccagc

SEQ ID NO: 63551 - RNA, 22 nt, Synthetic Construct
  source 1..22: mol_type = other RNA
ttcaccaccttctccacccagc

SEQ ID NO: 63552 - RNA, 23 nt, Synthetic Construct
  source 1..23: mol_type = other RNA
tgtgcaaatctatgcaaaactga

SEQ ID NO: 63553 - RNA, 32 nt, Synthetic Construct; identical to SEQ ID NO: 1128
  source 1..32: mol_type = other RNA

SEQ ID NO: 63554 - RNA, 32 nt, Synthetic Construct; identical to SEQ ID NO: 1128
  source 1..32: mol_type = other RNA

SEQ ID NO: 63555 - RNA, 24 nt, Synthetic Construct
  source 1..24: mol_type = other RNA
gaaagattaaggcaagaggttagc

SEQ ID NO: 63556 - RNA, 24 nt, Synthetic Construct
  source 1..24: mol_type = other RNA
tgtaaacaaccccgactggaagct

SEQ ID NO: 63557 - RNA, 21 nt, Synthetic Construct
  source 1..21: mol_type = other RNA
tgaggtagtaggctgtgtggt

SEQ ID NO: 63558 - RNA, 16 nt, Synthetic Construct
  source 1..16: mol_type = other RNA
gtctacggccatacca

SEQ ID NO: 63559 - RNA, 16 nt, Synthetic Construct
  source 1..16: mol_type = other RNA
gtctacggccatacca

SEQ ID NO: 63560 - RNA, 21 nt, Synthetic Construct
  source 1..21: mol_type = other RNA
taactccttagcgaatctcgc

SEQ ID NO: 63561 - RNA, 21 nt, Synthetic Construct
  source 1..21: mol_type = other RNA
taactccttagcgaatctcgc

SEQ ID NO: 63562 - RNA, 15 nt, Synthetic Construct
  source 1..15: mol_type = other RNA
gcggaaggatcattg

SEQ ID NO: 63563 - RNA, 15 nt, Synthetic Construct
  source 1..15: mol_type = other RNA
gcggaaggatcattg

SEQ ID NO: 63564 - RNA, 21 nt, Synthetic Construct
  source 1..21: mol_type = other RNA
gttggttcaagcgtgtagtcg

SEQ ID NO: 63565 - RNA, 21 nt, Synthetic Construct
  source 1..21: mol_type = other RNA
gttggttcaagcgtgtagtcg

SEQ ID NO: 63566 - RNA, 22 nt, Synthetic Construct
  source 1..22: mol_type = other RNA
tgaggtagtagatcgtatagtt

SEQ ID NO: 63567 - RNA, 23 nt, Synthetic Construct
  source 1..23: mol_type = other RNA
cgaagtgctgttcgtgcaggtag

SEQ ID NO: 63568 - RNA, 23 nt, Synthetic Construct
  source 1..23: mol_type = other RNA
cgaagtgctgttcgtgcaggtag

SEQ ID NO: 63569 - RNA, 22 nt, Synthetic Construct
  source 1..22: mol_type = other RNA
tattacacttgtcccggcctgt

SEQ ID NO: 63570 - RNA, 22 nt, Synthetic Construct
  source 1..22: mol_type = other RNA
tattacacttgtcccggcctgt

SEQ ID NO: 63571 - RNA, 26 nt, Synthetic Construct
  source 1..26: mol_type = other RNA
cgactcttagcggtggatcactcggc

SEQ ID NO: 63572 - RNA, 34 nt, Synthetic Construct; identical to SEQ ID NO: 16999
  source 1..34: mol_type = other RNA

SEQ ID NO: 63573 - RNA, 34 nt, Synthetic Construct; identical to SEQ ID NO: 16999
  source 1..34: mol_type = other RNA

SEQ ID NO: 63574 - RNA, 23 nt, Synthetic Construct
  source 1..23: mol_type = other RNA
tgaggtagtaggttgtgtggtaa

SEQ ID NO: 63575 - RNA, 26 nt, Synthetic Construct
  source 1..26: mol_type = other RNA
aaaccgttaccattactgagtttagt

SEQ ID NO: 63576 - RNA, 41 nt, Synthetic Construct; identical to SEQ ID NO: 10630
  source 1..41: mol_type = other RNA

SEQ ID NO: 63577 - RNA, 41 nt, Synthetic Construct; identical to SEQ ID NO: 10630
  source 1..41: mol_type = other RNA

SEQ ID NO: 63578 - RNA, 21 nt, Synthetic Construct
  source 1..21: mol_type = other RNA
tgaggtagaagattgtatagt

SEQ ID NO: 63579 - RNA, 22 nt, Synthetic Construct
  source 1..22: mol_type = other RNA
tagcagcacgtaaatattgccg

SEQ ID NO: 63580 - RNA, 16 nt, Synthetic Construct
  source 1..16: mol_type = other RNA
gactacggccatacca

SEQ ID NO: 63581 - RNA, 16 nt, Synthetic Construct
  source 1..16: mol_type = other RNA
gactacggccatacca

SEQ ID NO: 63582 - RNA, 21 nt, Synthetic Construct
  source 1..21: mol_type = other RNA
ctagactgaagccccttgagg

SEQ ID NO: 63583 - RNA, 21 nt, Synthetic Construct
  source 1..21: mol_type = other RNA
agcgtgcttgactgcgagact

SEQ ID NO: 63584 - RNA, 31 nt, Synthetic Construct; identical to SEQ ID NO: 2147
  source 1..31: mol_type = other RNA

SEQ ID NO: 63585 - RNA, 31 nt, Synthetic Construct; identical to SEQ ID NO: 2147
  source 1..31: mol_type = other RNA

SEQ ID NO: 63586 - RNA, 22 nt, Synthetic Construct
  source 1..22: mol_type = other RNA
ttaatgctaatcgtgatagggt

SEQ ID NO: 63587 - RNA, 21 nt, Synthetic Construct
  source 1..21: mol_type = other RNA
atgtcccacccccactcctgt

SEQ ID NO: 63588 - RNA, 17 nt, Synthetic Construct
  source 1..17: mol_type = other RNA
tggccgggacagagggc

SEQ ID NO: 63589 - RNA, 15 nt, Synthetic Construct
  source 1..15: mol_type = other RNA
aggtgggaggctttg

SEQ ID NO: 63590 - RNA, 21 nt, Synthetic Construct
  source 1..21: mol_type = other RNA
tgaggtagtaggtcgtatagt

SEQ ID NO: 63591 - RNA, 34 nt, Synthetic Construct; identical to SEQ ID NO: 6594
  source 1..34: mol_type = other RNA

SEQ ID NO: 63592 - RNA, 18 nt, Synthetic Construct
  source 1..18: mol_type = other RNA
tggagtgtgacaatggtg

SEQ ID NO: 63593 - RNA, 16 nt, Synthetic Construct
  source 1..16: mol_type = other RNA
ggccgttcttagttgg

SEQ ID NO: 63594 - RNA, 16 nt, Synthetic Construct
  source 1..16: mol_type = other RNA
ggccgttcttagttgg

SEQ ID NO: 63595 - RNA, 20 nt, Synthetic Construct
  source 1..20: mol_type = other RNA
caaagaattctccttttggg

SEQ ID NO: 63596 - RNA, 31 nt, Synthetic Construct; identical to SEQ ID NO: 1627
  source 1..31: mol_type = other RNA

SEQ ID NO: 63597 - RNA, 31 nt, Synthetic Construct; identical to SEQ ID NO: 1627
  source 1..31: mol_type = other RNA

SEQ ID NO: 63598 - RNA, 21 nt, Synthetic Construct
  source 1..21: mol_type = other RNA
ttcaagtaattcaggataggt

SEQ ID NO: 63599 - RNA, 21 nt, Synthetic Construct
  source 1..21: mol_type = other RNA
ttcaagtaattcaggataggt

SEQ ID NO: 63600 - RNA, 20 nt, Synthetic Construct
  source 1..20: mol_type = other RNA
gtacagtactgtgataactg

SEQ ID NO: 63601 - RNA, 20 nt, Synthetic Construct
  source 1..20: mol_type = other RNA
gtacagtactgtgataactg

SEQ ID NO: 63602 - RNA, 21 nt, Synthetic Construct
  source 1..21: mol_type = other RNA
tgaggtagtaggtcgtatagt

SEQ ID NO: 63603 - RNA, 22 nt, Synthetic Construct
  source 1..22: mol_type = other RNA
cggaatcgctagtaatcgcgga

SEQ ID NO: 63604 - RNA, 21 nt, Synthetic Construct
  source 1..21: mol_type = other RNA
tcctgtactgagctgctccga

SEQ ID NO: 63605 - RNA, 23 nt, Synthetic Construct
  source 1..23: mol_type = other RNA
ctttcagtcggatgtttacagtt

SEQ ID NO: 63606 - RNA, 23 nt, Synthetic Construct
  source 1..23: mol_type = other RNA
ctttcagtcggatgtttacagtt

SEQ ID NO: 63607 - RNA, 22 nt, Synthetic Construct
  source 1..22: mol_type = other RNA
tcaggtagtagtttgtgctgtt

SEQ ID NO: 63608 - RNA, 23 nt, Synthetic Construct
  source 1..23: mol_type = other RNA
caaagtgctgttcgtacaggtag

SEQ ID NO: 63609 - RNA, 21 nt, Synthetic Construct
  source 1..21: mol_type = other RNA
tgagaactgaattccatgggt

SEQ ID NO: 63610 - RNA, 23 nt, Synthetic Construct
  source 1..23: mol_type = other RNA
agcagcattgtgcagggctatga

SEQ ID NO: 63611 - RNA, 27 nt, Synthetic Construct
  source 1..27: mol_type = other RNA
ccccccactgctaaatttgactgactt

SEQ ID NO: 63612 - RNA, 22 nt, Synthetic Construct
  source 1..22: mol_type = other RNA
tgtagtgtatcctactttatgg

SEQ ID NO: 63613 - RNA, 22 nt, Synthetic Construct
  source 1..22: mol_type = other RNA
tgtagtgtatcctactttatgg

SEQ ID NO: 63614 - RNA, 22 nt, Synthetic Construct
  source 1..22: mol_type = other RNA
acaatgtaggtaagggaagtcg

SEQ ID NO: 63615 - RNA, 22 nt, Synthetic Construct
  source 1..22: mol_type = other RNA
acaatgtaggtaagggaagtcg

SEQ ID NO: 63616 - RNA, 17 nt, Synthetic Construct
  source 1..17: mol_type = other RNA
cgtgagctgggtttaga

SEQ ID NO: 63617 - RNA, 17 nt, Synthetic Construct
  source 1..17: mol_type = other RNA
cgtgagctgggtttaga

SEQ ID NO: 63618 - RNA, 21 nt, Synthetic Construct
  source 1..21: mol_type = other RNA
gtgccgaagctgtgggattga

SEQ ID NO: 63619 - RNA, 21 nt, Synthetic Construct
  source 1..21: mol_type = other RNA
gtgccgaagctgtgggattga

SEQ ID NO: 63620 - RNA, 23 nt, Synthetic Construct
  source 1..23: mol_type = other RNA
tgtaaacatccttgactggaagc

SEQ ID NO: 63621 - RNA, 23 nt, Synthetic Construct
  source 1..23: mol_type = other RNA
tgtaaacatccttgactggaagc

SEQ ID NO: 63622 - RNA, 22 nt, Synthetic Construct
  source 1..22: mol_type = other RNA
tgaggtagtagattgcatagtt

SEQ ID NO: 63623 - RNA, 22 nt, Synthetic Construct
  source 1..22: mol_type = other RNA
tgaggtagtagattgcatagtt

SEQ ID NO: 63624 - RNA, 21 nt, Synthetic Construct
  source 1..21: mol_type = other RNA
tcacagtgaaccggtctcttt

SEQ ID NO: 63625 - RNA, 21 nt, Synthetic Construct
  source 1..21: mol_type = other RNA
tcacagtgaaccggtctcttt

SEQ ID NO: 63626 - RNA, 16 nt, Synthetic Construct
  source 1..16: mol_type = other RNA
acggcccagactccta

SEQ ID NO: 63627 - RNA, 16 nt, Synthetic Construct
  source 1..16: mol_type = other RNA
acggcccagactccta

SEQ ID NO: 63628 - RNA, 21 nt, Synthetic Construct
  source 1..21: mol_type = other RNA
tagcagcacgtaatattggcg

SEQ ID NO: 63629 - RNA, 21 nt, Synthetic Construct
  source 1..21: mol_type = other RNA
tagcagcacgtaatattggcg

SEQ ID NO: 63630 - RNA, 21 nt, Synthetic Construct
  source 1..21: mol_type = other RNA
tacagtactgtgataactgaa

SEQ ID NO: 63631 - RNA, 21 nt, Synthetic Construct
  source 1..21: mol_type = other RNA
tacagtactgtgataactgaa

SEQ ID NO: 63632 - RNA, 22 nt, Synthetic Construct
  source 1..22: mol_type = other RNA
tcgtaccgtgagtaataatacg

SEQ ID NO: 63633 - RNA, 22 nt, Synthetic Construct
  source 1..22: mol_type = other RNA
tcgaaccgtgagtaataatgcg

SEQ ID NO: 63634 - RNA, 22 nt, Synthetic Construct
  source 1..22: mol_type = other RNA
tcgaaccgtgagtaataatgcg

SEQ ID NO: 63635 - RNA, 18 nt, Synthetic Construct
  source 1..18: mol_type = other RNA
ggtagcgtggccgagtgg

SEQ ID NO: 63636 - RNA, 18 nt, Synthetic Construct
  source 1..18: mol_type = other RNA
ggtagcgtggccgagtgg

SEQ ID NO: 63637 - RNA, 23 nt, Synthetic Construct
  source 1..23: mol_type = other RNA
tgtcagtttgtcaaatacaccaa

SEQ ID NO: 63638 - RNA, 21 nt, Synthetic Construct
  source 1..21: mol_type = other RNA
tgaggtggtagattgtatagt

SEQ ID NO: 63639 - RNA, 21 nt, Synthetic Construct
  source 1..21: mol_type = other RNA
tgaggtggtagattgtatagt

SEQ ID NO: 63640 - RNA, 22 nt, Synthetic Construct
  source 1..22: mol_type = other RNA
tgaggtagtagtatgtgctgtt

SEQ ID NO: 63641 - RNA, 20 nt, Synthetic Construct
  source 1..20: mol_type = other RNA
ctgacctatgaattgacagc

SEQ ID NO: 63642 - RNA, 21 nt, Synthetic Construct
  source 1..21: mol_type = other RNA
tgaggtagtagtttgtgctgt

SEQ ID NO: 63643 - RNA, 16 nt, Synthetic Construct
  source 1..16: mol_type = other RNA
ggtagctcgttgggct

SEQ ID NO: 63644 - RNA, 35 nt, Synthetic Construct; identical to SEQ ID NO: 9871
  source 1..35: mol_type = other RNA

SEQ ID NO: 63645 - RNA, 16 nt, Synthetic Construct
  source 1..16: mol_type = other RNA
gggaacgtgagctggg

SEQ ID NO: 63646 - RNA, 16 nt, Synthetic Construct
  source 1..16: mol_type = other RNA
gggaacgtgagctggg

SEQ ID NO: 63647 - RNA, 22 nt, Synthetic Construct
  source 1..22: mol_type = other RNA
atgtcccacccccactcctgtt

SEQ ID NO: 63648 - RNA, 22 nt, Synthetic Construct
  source 1..22: mol_type = other RNA
gaagaggacttggagctcgatc

SEQ ID NO: 63649 - RNA, 22 nt, Synthetic Construct
  source 1..22: mol_type = other RNA
agctcggtctgaggcccctcag

SEQ ID NO: 63650 - RNA, 22 nt, Synthetic Construct
  source 1..22: mol_type = other RNA
agctcggtctgaggcccctcag

SEQ ID NO: 63651 - RNA, 22 nt, Synthetic Construct
  source 1..22: mol_type = other RNA
tgaggtagtagtttgtactgtt

SEQ ID NO: 63652 - RNA, 21 nt, Synthetic Construct
  source 1..21: mol_type = other RNA
tcctgtactgagctgctccga

SEQ ID NO: 63653 - RNA, 16 nt, Synthetic Construct
  source 1..16: mol_type = other RNA
tacctggttgatcctg

SEQ ID NO: 63654 - RNA, 16 nt, Synthetic Construct
  source 1..16: mol_type = other RNA
tacctggttgatcctg

SEQ ID NO: 63655 - RNA, 22 nt, Synthetic Construct
  source 1..22: mol_type = other RNA
ttgtaccgtgagtaataatgcg

SEQ ID NO: 63656 - RNA, 22 nt, Synthetic Construct
  source 1..22: mol_type = other RNA
ttgtaccgtgagtaataatgcg

SEQ ID NO: 63657 - RNA, 22 nt, Synthetic Construct
  source 1..22: mol_type = other RNA
agaggtagtagtttgtgctgtt

SEQ ID NO: 63658 - RNA, 22 nt, Synthetic Construct
  source 1..22: mol_type = other RNA
agaggtagtagtttgtgctgtt

SEQ ID NO: 63659 - RNA, 41 nt, Synthetic Construct
  source 1..41: mol_type = other RNA
gctaaacctagccccaaacccactccaccttactaccagac

SEQ ID NO: 63660 - RNA, 41 nt, Synthetic Construct; identical to SEQ ID NO: 63659
  source 1..41: mol_type = other RNA

SEQ ID NO: 63661 - RNA, 17 nt, Synthetic Construct
  source 1..17: mol_type = other RNA
gcagatcttggtggtag

SEQ ID NO: 63662 - RNA, 17 nt, Synthetic Construct
  source 1..17: mol_type = other RNA
gcagatcttggtggtag

SEQ ID NO: 63663 - RNA, 23 nt, Synthetic Construct
  source 1..23: mol_type = other RNA
tggtgatacgacgtacttagtgt

SEQ ID NO: 63664 - RNA, 32 nt, Synthetic Construct; identical to SEQ ID NO: 2798
  source 1..32: mol_type = other RNA

SEQ ID NO: 63665 - RNA, 22 nt, Synthetic Construct
  source 1..22: mol_type = other RNA
tcgtaccgtgggtaataatgcg

SEQ ID NO: 63666 - RNA, 22 nt, Synthetic Construct
  source 1..22: mol_type = other RNA
tcgtaccgtgggtaataatgcg

SEQ ID NO: 63667 - RNA, 25 nt, Synthetic Construct
  source 1..25: mol_type = other RNA
ttgaggatacgagatcgagacgaca

SEQ ID NO: 63668 - RNA, 25 nt, Synthetic Construct
  source 1..25: mol_type = other RNA
ttgaggatacgagatcgagacgaca

SEQ ID NO: 63669 - RNA, 22 nt, Synthetic Construct
  source 1..22: mol_type = other RNA
tggaacgtaaagaagtatgtat

SEQ ID NO: 63670 - RNA, 17 nt, Synthetic Construct
  source 1..17: mol_type = other RNA
agcggtggatgatgtgg

SEQ ID NO: 63671 - RNA, 21 nt, Synthetic Construct
  source 1..21: mol_type = other RNA
ctaggctgaagctccttgagg

SEQ ID NO: 63672 - RNA, 22 nt, Synthetic Construct
  source 1..22: mol_type = other RNA
tagcaacacgtaaatattggcg

SEQ ID NO: 63673 - RNA, 20 nt, Synthetic Construct
  source 1..20: mol_type = other RNA
gcatggccgttcttagttgg

SEQ ID NO: 63674 - RNA, 29 nt, Synthetic Construct
  source 1..29: mol_type = other RNA
cccccccactgctaaatttgactggcttt

SEQ ID NO: 63675 - RNA, 24 nt, Synthetic Construct
  source 1..24: mol_type = other RNA
aaaccgttaccattactgagttta

SEQ ID NO: 63676 - RNA, 22 nt, Synthetic Construct
  source 1..22: mol_type = other RNA
tgaggcagtagtttgtgctgtt

SEQ ID NO: 63677 - RNA, 23 nt, Synthetic Construct
  source 1..23: mol_type = other RNA
tcctgtactgagttgccccgaga

SEQ ID NO: 63678 - RNA, 28 nt, Synthetic Construct
  source 1..28: mol_type = other RNA
agcgctgagaagacggtcgaacttgact

SEQ ID NO: 63679 - RNA, 28 nt, Synthetic Construct
  source 1..28: mol_type = other RNA
agcgctgagaagacggtcgaacttgact

SEQ ID NO: 63680 - RNA, 17 nt, Synthetic Construct
  source 1..17: mol_type = other RNA
cctcgcgcgattggagc

SEQ ID NO: 63681 - RNA, 21 nt, Synthetic Construct
  source 1..21: mol_type = other RNA
agggctgggtcggtcgggctg

SEQ ID NO: 63682 - RNA, 21 nt, Synthetic Construct
  source 1..21: mol_type = other RNA
agggctgggtcggtcgggctg

SEQ ID NO: 63683 - RNA, 21 nt, Synthetic Construct
  source 1..21: mol_type = other RNA
caaagtgctgttcgtgcaggt

SEQ ID NO: 63684 - RNA, 21 nt, Synthetic Construct
  source 1..21: mol_type = other RNA
caaagtgctgttcgtgcaggt

SEQ ID NO: 63685 - RNA, 24 nt, Synthetic Construct
  source 1..24: mol_type = other RNA
tgaggtagtaggttgtgtggttaa

SEQ ID NO: 63686 - RNA, 22 nt, Synthetic Construct
  source 1..22: mol_type = other RNA
ccagtgcactacagaactttgt

SEQ ID NO: 63687 - RNA, 22 nt, Synthetic Construct
  source 1..22: mol_type = other RNA
tgaggtagtaggttgagtggtt

SEQ ID NO: 63688 - RNA, 22 nt, Synthetic Construct
  source 1..22: mol_type = other RNA
tgaggtagtaggttgagtggtt

SEQ ID NO: 63689 - RNA, 16 nt, Synthetic Construct
  source 1..16: mol_type = other RNA
agttgaccgcctgggg

SEQ ID NO: 63690 - RNA, 20 nt, Synthetic Construct
  source 1..20: mol_type = other RNA
tgaggtagtgggttgtgtgg

SEQ ID NO: 63691 - RNA, 21 nt, Synthetic Construct
  source 1..21: mol_type = other RNA
tgaggtggtagattgtatagt

SEQ ID NO: 63692 - RNA, 24 nt, Synthetic Construct
  source 1..24: mol_type = other RNA
tgtaaacatccccgactggaggct

SEQ ID NO: 63693 - RNA, 24 nt, Synthetic Construct
  source 1..24: mol_type = other RNA
tgtaaacatccccgactggaggct

SEQ ID NO: 63694 - RNA, 24 nt, Synthetic Construct
  source 1..24: mol_type = other RNA
ttaatgctaatcgtgataggggtt

SEQ ID NO: 63695 - RNA, 20 nt, Synthetic Construct
  source 1..20: mol_type = other RNA
atcacattgccagggatttc

SEQ ID NO: 63696 - RNA, 23 nt, Synthetic Construct
  source 1..23: mol_type = other RNA
caaagtgctgttcatgcaggtag

SEQ ID NO: 63697 - RNA, 22 nt, Synthetic Construct
  source 1..22: mol_type = other RNA
tgtgactggttgaccagagggt

SEQ ID NO: 63698 - RNA, 22 nt, Synthetic Construct
  source 1..22: mol_type = other RNA
tgaagtagtaggttgtatagtt

SEQ ID NO: 63699 - RNA, 23 nt, Synthetic Construct
  source 1..23: mol_type = other RNA
ggcagcattgtacagggctatga

SEQ ID NO: 63700 - RNA, 26 nt, Synthetic Construct
  source 1..26: mol_type = other RNA
acctggcatacaatgtagatttctgt

SEQ ID NO: 63701 - RNA, 26 nt, Synthetic Construct
  source 1..26: mol_type = other RNA
acctggcatacaatgtagatttctgt

SEQ ID NO: 63702 - RNA, 16 nt, Synthetic Construct
  source 1..16: mol_type = other RNA
gtctatggccatacca

SEQ ID NO: 63703 - RNA, 23 nt, Synthetic Construct
  source 1..23: mol_type = other RNA
ccctgtactgagctgccccgagt

SEQ ID NO: 63704 - RNA, 27 nt, Synthetic Construct
  source 1..27: mol_type = other RNA
cgcgacctcagatcagacgtggcgacc

SEQ ID NO: 63705 - RNA, 27 nt, Synthetic Construct
  source 1..27: mol_type = other RNA
cgcgacctcagatcagacgtggcgacc

SEQ ID NO: 63706 - RNA, 23 nt, Synthetic Construct
  source 1..23: mol_type = other RNA
aatgacacgatcactcccgttga

SEQ ID NO: 63707 - RNA, 23 nt, Synthetic Construct
  source 1..23: mol_type = other RNA
aatgacacgatcactcccgttga

SEQ ID NO: 63708 - RNA, 27 nt, Synthetic Construct
  source 1..27: mol_type = other RNA
ccccccacagctaaatttgactggcta

SEQ ID NO: 63709 - RNA, 27 nt, Synthetic Construct
  source 1..27: mol_type = other RNA
ccccccacagctaaatttgactggcta

SEQ ID NO: 63710 - RNA, 18 nt, Synthetic Construct
  source 1..18: mol_type = other RNA
gtcaggatggccgagcgg

SEQ ID NO: 63711 - RNA, 18 nt, Synthetic Construct
  source 1..18: mol_type = other RNA
gctgtgatggccgagtgg

SEQ ID NO: 63712 - RNA, 22 nt, Synthetic Construct
  source 1..22: mol_type = other RNA
tggggtagtaggttgtgtggtt

SEQ ID NO: 63713 - RNA, 15 nt, Synthetic Construct
  source 1..15: mol_type = other RNA
gtcaggatgttggct

SEQ ID NO: 63714 - RNA, 23 nt, Synthetic Construct
  source 1..23: mol_type = other RNA
tgaggtagtagtttgtgctgttg

SEQ ID NO: 63715 - RNA, 23 nt, Synthetic Construct
  source 1..23: mol_type = other RNA
tgaggtagtagtttgtgctgttg

SEQ ID NO: 63716 - RNA, 33 nt, Synthetic Construct; identical to SEQ ID NO: 56504
  source 1..33: mol_type = other RNA

SEQ ID NO: 63717 - RNA, 33 nt, Synthetic Construct; identical to SEQ ID NO: 56504
  source 1..33: mol_type = other RNA

SEQ ID NO: 63718 - RNA, 21 nt, Synthetic Construct
  source 1..21: mol_type = other RNA
aacccgtagatccgatcttgt

SEQ ID NO: 63719 - RNA, 21 nt, Synthetic Construct
  source 1..21: mol_type = other RNA
aacccgtagatccgatcttgt

SEQ ID NO: 63720 - RNA, 20 nt, Synthetic Construct
  source 1..20: mol_type = other RNA
ttggcctcaagtcaggcagg

SEQ ID NO: 63721 - RNA, 22 nt, Synthetic Construct
  source 1..22: mol_type = other RNA
aagctgccagttgaagaactgt

SEQ ID NO: 63722 - RNA, 22 nt, Synthetic Construct
  source 1..22: mol_type = other RNA
aagctgccagttgaagaactgt

SEQ ID NO: 63723 - RNA, 23 nt, Synthetic Construct
  source 1..23: mol_type = other RNA
aaaagctgggttgagagggcgaa

SEQ ID NO: 63724 - RNA, 21 nt, Synthetic Construct
  source 1..21: mol_type = other RNA
tctttggttatctagctgtat

SEQ ID NO: 63725 - RNA, 22 nt, Synthetic Construct
  source 1..22: mol_type = other RNA
aaggtagatagaacaggtcttg

SEQ ID NO: 63726 - RNA, 22 nt, Synthetic Construct
  source 1..22: mol_type = other RNA
aaggtagatagaacaggtcttg

SEQ ID NO: 63727 - RNA, 22 nt, Synthetic Construct
  source 1..22: mol_type = other RNA
tgaggtagtagtttgtggtgtt

SEQ ID NO: 63728 - RNA, 22 nt, Synthetic Construct
  source 1..22: mol_type = other RNA
tggaatgtaaagaagtatgtac

SEQ ID NO: 63729 - RNA, 22 nt, Synthetic Construct
  source 1..22: mol_type = other RNA
aggaatgtaaagaagtatgtat

SEQ ID NO: 63730 - RNA, 22 nt, Synthetic Construct
  source 1..22: mol_type = other RNA
aggaatgtaaagaagtatgtat

SEQ ID NO: 63731 - RNA, 15 nt, Synthetic Construct
  source 1..15: mol_type = other RNA
cagtgaaacgagtca

SEQ ID NO: 63732 - RNA, 23 nt, Synthetic Construct
  source 1..23: mol_type = other RNA
tgaggtagtaggttgtgtggttt

SEQ ID NO: 63733 - RNA, 23 nt, Synthetic Construct
  source 1..23: mol_type = other RNA
tgaggtagtaggttgtgtggttt

SEQ ID NO: 63734 - RNA, 16 nt, Synthetic Construct
  source 1..16: mol_type = other RNA
gtccggatcgtagtct

SEQ ID NO: 63735 - RNA, 22 nt, Synthetic Construct
  source 1..22: mol_type = other RNA
tatatatatatatgtacgtatg

SEQ ID NO: 63736 - RNA, 23 nt, Synthetic Construct
  source 1..23: mol_type = other RNA
tcctgtacagagctgccccgaga

SEQ ID NO: 63737 - RNA, 21 nt, Synthetic Construct
  source 1..21: mol_type = other RNA
aagctgccagttgaagaactg

SEQ ID NO: 63738 - RNA, 21 nt, Synthetic Construct
  source 1..21: mol_type = other RNA
aagctgccagttgaagaactg

SEQ ID NO: 63739 - RNA, 24 nt, Synthetic Construct
  source 1..24: mol_type = other RNA
tgaggtagtaggttgtgtggttta

SEQ ID NO: 63740 - RNA, 24 nt, Synthetic Construct
  source 1..24: mol_type = other RNA
tgaggtagtaggttgtgtggttta

SEQ ID NO: 63741 - RNA, 23 nt, Synthetic Construct
  source 1..23: mol_type = other RNA
cgacggaatcccaaaagcagctg

SEQ ID NO: 63742 - RNA, 23 nt, Synthetic Construct
  source 1..23: mol_type = other RNA
cgacggaatcccaaaagcagctg

SEQ ID NO: 63743 - RNA, 21 nt, Synthetic Construct
  source 1..21: mol_type = other RNA
tgaggcagtaggttgtatagt

SEQ ID NO: 63744 - RNA, 22 nt, Synthetic Construct
  source 1..22: mol_type = other RNA
tgggaactgaattccatgggtt

SEQ ID NO: 63745 - RNA, 22 nt, Synthetic Construct
  source 1..22: mol_type = other RNA
tgggaactgaattccatgggtt

SEQ ID NO: 63746 - RNA, 23 nt, Synthetic Construct
  source 1..23: mol_type = other RNA
tgaggtagtagtttgtgctgtta

SEQ ID NO: 63747 - RNA, 22 nt, Synthetic Construct
  source 1..22: mol_type = other RNA
caatgcacttgtctcggtctga

SEQ ID NO: 63748 - RNA, 22 nt, Synthetic Construct
  source 1..22: mol_type = other RNA
caatgcacttgtctcggtctga

SEQ ID NO: 63749 - RNA, 24 nt, Synthetic Construct
  source 1..24: mol_type = other RNA
tgcaaacatccccgactggaagct

SEQ ID NO: 63750 - RNA, 22 nt, Synthetic Construct
  source 1..22: mol_type = other RNA
tagcagcgcgtaaatattggcg

SEQ ID NO: 63751 - RNA, 22 nt, Synthetic Construct
  source 1..22: mol_type = other RNA
tagcagcgcgtaaatattggcg

SEQ ID NO: 63752 - RNA, 21 nt, Synthetic Construct
  source 1..21: mol_type = other RNA
tggggggcagagagcgagact

SEQ ID NO: 63753 - RNA, 19 nt, Synthetic Construct
  source 1..19: mol_type = other RNA
tgaggtagtaggttgtgtg

SEQ ID NO: 63754 - RNA, 18 nt, Synthetic Construct
  source 1..18: mol_type = other RNA
ggtagcgtggccgagtgg

SEQ ID NO: 63755 - RNA, 18 nt, Synthetic Construct
  source 1..18: mol_type = other RNA
ggtagcgtggccgagtgg

SEQ ID NO: 63756 - RNA, 19 nt, Synthetic Construct
  source 1..19: mol_type = other RNA
gggtgcaagcgttaatcgg

SEQ ID NO: 63757 - RNA, 22 nt, Synthetic Construct
  source 1..22: mol_type = other RNA
tgaggtagtagttagtgctgtt

SEQ ID NO: 63758 - RNA, 22 nt, Synthetic Construct
  source 1..22: mol_type = other RNA
tgaggtagtagttagtgctgtt

SEQ ID NO: 63759 - RNA, 27 nt, Synthetic Construct
  source 1..27: mol_type = other RNA
ccccccgctgctaaatttgactggctt

SEQ ID NO: 63760 - RNA, 19 nt, Synthetic Construct
  source 1..19: mol_type = other RNA
tgaggtagtaggttgtgtg

SEQ ID NO: 63761 - RNA, 24 nt, Synthetic Construct
  source 1..24: mol_type = other RNA
tgtaaacatccccgactggaggct

SEQ ID NO: 63762 - RNA, 24 nt, Synthetic Construct
  source 1..24: mol_type = other RNA
gactcttagcggtggatcactcgg

SEQ ID NO: 63763 - RNA, 21 nt, Synthetic Construct
  source 1..21: mol_type = other RNA
tgaggtagtaggttgtgcggt

SEQ ID NO: 63764 - RNA, 22 nt, Synthetic Construct
  source 1..22: mol_type = other RNA
tgaggtagtagcttgtgctgtt

SEQ ID NO: 63765 - RNA, 22 nt, Synthetic Construct
  source 1..22: mol_type = other RNA
tagcagcacgaaaatattggcg

SEQ ID NO: 63766 - RNA, 22 nt, Synthetic Construct
  source 1..22: mol_type = other RNA
tagcagcacgaaaatattggcg

SEQ ID NO: 63767 - RNA, 23 nt, Synthetic Construct
  source 1..23: mol_type = other RNA
cgaatgttgctcggtgaacccct

SEQ ID NO: 63768 - RNA, 23 nt, Synthetic Construct
  source 1..23: mol_type = other RNA
cgaatgttgctcggtgaacccct

SEQ ID NO: 63769 - RNA, 29 nt, Synthetic Construct
  source 1..29: mol_type = other RNA
gtgcatgcactctggggttgtgggacagc

SEQ ID NO: 63770 - RNA, 34 nt, Synthetic Construct; identical to SEQ ID NO: 13733
  source 1..34: mol_type = other RNA

SEQ ID NO: 63771 - RNA, 17 nt, Synthetic Construct
  source 1..17: mol_type = other RNA
cagtagctcgaggaaaa

SEQ ID NO: 63772 - RNA, 18 nt, Synthetic Construct
  source 1..18: mol_type = other RNA
aaggaattgacggaaggg

SEQ ID NO: 63773 - RNA, 18 nt, Synthetic Construct
  source 1..18: mol_type = other RNA
aaggaattgacggaaggg

SEQ ID NO: 63774 - RNA, 18 nt, Synthetic Construct
  source 1..18: mol_type = other RNA
gacgaggtggccgagtgg

SEQ ID NO: 63775 - RNA, 23 nt, Synthetic Construct
  source 1..23: mol_type = other RNA
taccacagggtagaaccacggac

SEQ ID NO: 63776 - RNA, 23 nt, Synthetic Construct
  source 1..23: mol_type = other RNA
taccacagggtagaaccacggac

SEQ ID NO: 63777 - RNA, 36 nt, Synthetic Construct; identical to SEQ ID NO: 744
  source 1..36: mol_type = other RNA

SEQ ID NO: 63778 - RNA, 36 nt, Synthetic Construct; identical to SEQ ID NO: 744
  source 1..36: mol_type = other RNA

SEQ ID NO: 63779 - RNA, 22 nt, Synthetic Construct
  source 1..22: mol_type = other RNA
ccgtaccgtgagtaataatgcg

SEQ ID NO: 63780 - RNA, 22 nt, Synthetic Construct
  source 1..22: mol_type = other RNA
ccgtaccgtgagtaataatgcg

SEQ ID NO: 63781 - RNA, 27 nt, Synthetic Construct
  source 1..27: mol_type = other RNA
ccccccactgttaaatttgactggctt

SEQ ID NO: 63782 - RNA, 27 nt, Synthetic Construct
  source 1..27: mol_type = other RNA
ccccccactgttaaatttgactggctt

SEQ ID NO: 63783 - RNA, 23 nt, Synthetic Construct
  source 1..23: mol_type = other RNA
agcagcattgtacagggctataa

SEQ ID NO: 63784 - RNA, 23 nt, Synthetic Construct
  source 1..23: mol_type = other RNA
tgtcagtttgtcaaatacccctt

SEQ ID NO: 63785 - RNA, 22 nt, Synthetic Construct
  source 1..22: mol_type = other RNA
tgaggtagtgggttgtatagtt

SEQ ID NO: 63786 - RNA, 22 nt, Synthetic Construct
  source 1..22: mol_type = other RNA
tgaggtagtgggttgtatagtt

SEQ ID NO: 63787 - RNA, 22 nt, Synthetic Construct
  source 1..22: mol_type = other RNA
tattgcacttgtcccgacctgt

SEQ ID NO: 63788 - RNA, 22 nt, Synthetic Construct
  source 1..22: mol_type = other RNA
ttaaagtaattcaggataggtt

SEQ ID NO: 63789 - RNA, 35 nt, Synthetic Construct; identical to SEQ ID NO: 1095
  source 1..35: mol_type = other RNA

SEQ ID NO: 63790 - RNA, 24 nt, Synthetic Construct
  source 1..24: mol_type = other RNA
tcctgtactgagctgccccgagtt

SEQ ID NO: 63791 - RNA, 21 nt, Synthetic Construct
  source 1..21: mol_type = other RNA
tgaggtagtagactgtatagt

SEQ ID NO: 63792 - RNA, 22 nt, Synthetic Construct
  source 1..22: mol_type = other RNA
tagcagcatgtaaatattggcg

SEQ ID NO: 63793 - RNA, 27 nt, Synthetic Construct
  source 1..27: mol_type = other RNA
ccccccactactaaatttgactggctt

SEQ ID NO: 63794 - RNA, 33 nt, Synthetic Construct; identical to SEQ ID NO: 33377
  source 1..33: mol_type = other RNA

SEQ ID NO: 63795 - RNA, 33 nt, Synthetic Construct; identical to SEQ ID NO: 33377
  source 1..33: mol_type = other RNA

SEQ ID NO: 63796 - RNA, 24 nt, Synthetic Construct
  source 1..24: mol_type = other RNA
aaaagctgggttgagagggcgaaa

SEQ ID NO: 63797 - RNA, 22 nt, Synthetic Construct
  source 1..22: mol_type = other RNA
tattgcacttgtcccgacctgt

SEQ ID NO: 63798 - RNA, 22 nt, Synthetic Construct
  source 1..22: mol_type = other RNA
tattgcacttgtcccgacctgt

SEQ ID NO: 63799 - RNA, 20 nt, Synthetic Construct
  source 1..20: mol_type = other RNA
ttatcagaatctccaggggt

SEQ ID NO: 63800 - RNA, 23 nt, Synthetic Construct
  source 1..23: mol_type = other RNA
tcactgatcgagtcgtcctgcgc

SEQ ID NO: 63801 - RNA, 23 nt, Synthetic Construct
  source 1..23: mol_type = other RNA
tcactgatcgagtcgtcctgcgc

SEQ ID NO: 63802 - RNA, 24 nt, Synthetic Construct
  source 1..24: mol_type = other RNA
tcctccctcgggagggcgcgcggg

SEQ ID NO: 63803 - RNA, 22 nt, Synthetic Construct
  source 1..22: mol_type = other RNA
accacagggtagaaccacggac

SEQ ID NO: 63804 - RNA, 22 nt, Synthetic Construct
  source 1..22: mol_type = other RNA
accacagggtagaaccacggac

SEQ ID NO: 63805 - RNA, 23 nt, Synthetic Construct
  source 1..23: mol_type = other RNA
ctttcagtcggatgtttacagtt

SEQ ID NO: 63806 - RNA, 23 nt, Synthetic Construct
  source 1..23: mol_type = other RNA
ctttcagtcggatgtttacagtt

SEQ ID NO: 63807 - RNA, 24 nt, Synthetic Construct
  source 1..24: mol_type = other RNA
tgtaaacaaccccgactggaagct

SEQ ID NO: 63808 - RNA, 24 nt, Synthetic Construct
  source 1..24: mol_type = other RNA
tgtaaacaaccccgactggaagct

SEQ ID NO: 63809 - RNA, 22 nt, Synthetic Construct
  source 1..22: mol_type = other RNA
tgaggtagtggattgtatagtt

SEQ ID NO: 63810 - RNA, 16 nt, Synthetic Construct
  source 1..16: mol_type = other RNA
gtctacggccatgcca

SEQ ID NO: 63811 - RNA, 22 nt, Synthetic Construct
  source 1..22: mol_type = other RNA
tgagatagtagtttgtgctgtt

SEQ ID NO: 63812 - RNA, 30 nt, Synthetic Construct; identical to SEQ ID NO: 1958
  source 1..30: mol_type = other RNA

SEQ ID NO: 63813 - RNA, 22 nt, Synthetic Construct
  source 1..22: mol_type = other RNA
caatgcacttgtctcggtctga

SEQ ID NO: 63814 - RNA, 20 nt, Synthetic Construct
  source 1..20: mol_type = other RNA
caacggaatcccaaaagcag

SEQ ID NO: 63815 - RNA, 20 nt, Synthetic Construct
  source 1..20: mol_type = other RNA
caacggaatcccaaaagcag

SEQ ID NO: 63816 - RNA, 22 nt, Synthetic Construct
  source 1..22: mol_type = other RNA
ccgtaccgtgagtaataatgcg

SEQ ID NO: 63817 - RNA, 22 nt, Synthetic Construct
  source 1..22: mol_type = other RNA
ttcaagtaacccaggataggct

SEQ ID NO: 63818 - RNA, 22 nt, Synthetic Construct
  source 1..22: mol_type = other RNA
ttcaagtaacccaggataggct

SEQ ID NO: 63819 - RNA, 31 nt, Synthetic Construct; identical to SEQ ID NO: 13805
  source 1..31: mol_type = other RNA

SEQ ID NO: 63820 - RNA, 31 nt, Synthetic Construct; identical to SEQ ID NO: 13805
  source 1..31: mol_type = other RNA

SEQ ID NO: 63821 - RNA, 19 nt, Synthetic Construct
  source 1..19: mol_type = other RNA
aaaagctgggttgagaggg

SEQ ID NO: 63822 - RNA, 23 nt, Synthetic Construct
  source 1..23: mol_type = other RNA
tggtaacacgacgtacttagtgt

SEQ ID NO: 63823 - RNA, 31 nt, Synthetic Construct; identical to SEQ ID NO: 5943
  source 1..31: mol_type = other RNA

SEQ ID NO: 63824 - RNA, 19 nt, Synthetic Construct
  source 1..19: mol_type = other RNA
tccctgttcgggcgccatt

SEQ ID NO: 63825 - RNA, 19 nt, Synthetic Construct
  source 1..19: mol_type = other RNA
tccctgttcgggcgccatt

SEQ ID NO: 63826 - RNA, 22 nt, Synthetic Construct
  source 1..22: mol_type = other RNA
tcagtgcactacagaactttga

SEQ ID NO: 63827 - RNA, 29 nt, Synthetic Construct
  source 1..29: mol_type = other RNA
cgctaaaccattcgtagacgacctgcttc

SEQ ID NO: 63828 - RNA, 29 nt, Synthetic Construct
  source 1..29: mol_type = other RNA
cgctaaaccattcgtagacgacctgcttc

SEQ ID NO: 63829 - RNA, 22 nt, Synthetic Construct
  source 1..22: mol_type = other RNA
tggcagcacgtaaatattggcg

SEQ ID NO: 63830 - RNA, 22 nt, Synthetic Construct
  source 1..22: mol_type = other RNA
tggcagcacgtaaatattggcg

SEQ ID NO: 63831 - RNA, 23 nt, Synthetic Construct
  source 1..23: mol_type = other RNA
tgtagtgtttcctactttatggt

SEQ ID NO: 63832 - RNA, 23 nt, Synthetic Construct
  source 1..23: mol_type = other RNA
tgtagtgtttcctactttatggt

SEQ ID NO: 63833 - RNA, 23 nt, Synthetic Construct
  source 1..23: mol_type = other RNA
caaagtgctgttcgtgcaggaag

SEQ ID NO: 63834 - RNA, 23 nt, Synthetic Construct
  source 1..23: mol_type = other RNA
caaagtgctgttcgtgcaggaag

SEQ ID NO: 63835 - RNA, 18 nt, Synthetic Construct
  source 1..18: mol_type = other RNA
agcaggacggtggccatg

SEQ ID NO: 63836 - RNA, 15 nt, Synthetic Construct
  source 1..15: mol_type = other RNA
tcagtagctcgagga

SEQ ID NO: 63837 - RNA, 15 nt, Synthetic Construct
  source 1..15: mol_type = other RNA
tcagtagctcgagga

SEQ ID NO: 63838 - RNA, 27 nt, Synthetic Construct
  source 1..27: mol_type = other RNA
ccccccactgccaaatttgactggctt

SEQ ID NO: 63839 - RNA, 27 nt, Synthetic Construct
  source 1..27: mol_type = other RNA
ccccccactgccaaatttgactggctt

SEQ ID NO: 63840 - RNA, 17 nt, Synthetic Construct
  source 1..17: mol_type = other RNA
ggctggtccgaaggtag

SEQ ID NO: 63841 - RNA, 25 nt, Synthetic Construct
  source 1..25: mol_type = other RNA
aacattcaacgctgtcggtgagttt

SEQ ID NO: 63842 - RNA, 25 nt, Synthetic Construct
  source 1..25: mol_type = other RNA
aacattcaacgctgtcggtgagttt

SEQ ID NO: 63843 - RNA, 23 nt, Synthetic Construct
  source 1..23: mol_type = other RNA
acagtagtctgcacattggttaa

SEQ ID NO: 63844 - RNA, 23 nt, Synthetic Construct
  source 1..23: mol_type = other RNA
acagtagtctgcacattggttaa

SEQ ID NO: 63845 - RNA, 16 nt, Synthetic Construct
  source 1..16: mol_type = other RNA
gtctacggacatacca

SEQ ID NO: 63846 - RNA, 16 nt, Synthetic Construct
  source 1..16: mol_type = other RNA
gtctacggacatacca

SEQ ID NO: 63847 - RNA, 27 nt, Synthetic Construct
  source 1..27: mol_type = other RNA
ccccccactgctaaatttgactggctg

SEQ ID NO: 63848 - RNA, 29 nt, Synthetic Construct
  source 1..29: mol_type = other RNA
ttacaggggttcgaatcccctaggggacg

SEQ ID NO: 63849 - RNA, 22 nt, Synthetic Construct
  source 1..22: mol_type = other RNA
tgaggtagtagtttgtgttgtt

SEQ ID NO: 63850 - RNA, 16 nt, Synthetic Construct
  source 1..16: mol_type = other RNA
cgtgagctgggtttag

SEQ ID NO: 63851 - RNA, 21 nt, Synthetic Construct
  source 1..21: mol_type = other RNA
ttagtgacgcgcatgaatgga

SEQ ID NO: 63852 - RNA, 21 nt, Synthetic Construct
  source 1..21: mol_type = other RNA
ttagtgacgcgcatgaatgga

SEQ ID NO: 63853 - RNA, 21 nt, Synthetic Construct
  source 1..21: mol_type = other RNA
ctcgtagttggatcttgggag

SEQ ID NO: 63854 - RNA, 22 nt, Synthetic Construct
  source 1..22: mol_type = other RNA
tagtagcacgtaaatattggcg

SEQ ID NO: 63855 - RNA, 22 nt, Synthetic Construct
  source 1..22: mol_type = other RNA
tagtagcacgtaaatattggcg

SEQ ID NO: 63856 - RNA, 21 nt, Synthetic Construct
  source 1..21: mol_type = other RNA
taaggtagtaggttgtatagt

SEQ ID NO: 63857 - RNA, 16 nt, Synthetic Construct
  source 1..16: mol_type = other RNA
agcaagtcgaacggta

SEQ ID NO: 63858 - RNA, 16 nt, Synthetic Construct
  source 1..16: mol_type = other RNA
agcaagtcgaacggta

SEQ ID NO: 63859 - RNA, 22 nt, Synthetic Construct
  source 1..22: mol_type = other RNA
tgaggtagtagttcgtgctgtt

SEQ ID NO: 63860 - RNA, 21 nt, Synthetic Construct
  source 1..21: mol_type = other RNA
agctacattgtctgctgggtt

SEQ ID NO: 63861 - RNA, 19 nt, Synthetic Construct
  source 1..19: mol_type = other RNA
agctacattgtctgctggg

SEQ ID NO: 63862 - RNA, 22 nt, Synthetic Construct
  source 1..22: mol_type = other RNA
tgaggtagtagtttgagctgtt

SEQ ID NO: 63863 - RNA, 21 nt, Synthetic Construct
  source 1..21: mol_type = other RNA
tggggtgtgacaatggtgttt

SEQ ID NO: 63864 - RNA, 21 nt, Synthetic Construct
  source 1..21: mol_type = other RNA
tggggtgtgacaatggtgttt

SEQ ID NO: 63865 - RNA, 23 nt, Synthetic Construct
  source 1..23: mol_type = other RNA
agctcggtctgaggcccctcaga

SEQ ID NO: 63866 - RNA, 23 nt, Synthetic Construct
  source 1..23: mol_type = other RNA
agctcggtctgaggcccctcaga

SEQ ID NO: 63867 - RNA, 24 nt, Synthetic Construct
  source 1..24: mol_type = other RNA
aatgacacgatcactcccgttgag

SEQ ID NO: 63868 - RNA, 24 nt, Synthetic Construct
  source 1..24: mol_type = other RNA
aatgacacgatcactcccgttgag

SEQ ID NO: 63869 - RNA, 15 nt, Synthetic Construct
  source 1..15: mol_type = other RNA
agttgaccgcctggg

SEQ ID NO: 63870 - RNA, 23 nt, Synthetic Construct
  source 1..23: mol_type = other RNA
tcctgtactgggctgccccgagt

SEQ ID NO: 63871 - RNA, 22 nt, Synthetic Construct
  source 1..22: mol_type = other RNA
tgagaactgaattccatgggta

SEQ ID NO: 63872 - RNA, 22 nt, Synthetic Construct
  source 1..22: mol_type = other RNA
tgagaactgaattccatgggta

SEQ ID NO: 63873 - RNA, 37 nt, Synthetic Construct; identical to SEQ ID NO: 715
  source 1..37: mol_type = other RNA

SEQ ID NO: 63874 - RNA, 37 nt, Synthetic Construct; identical to SEQ ID NO: 715
  source 1..37: mol_type = other RNA

SEQ ID NO: 63875 - RNA, 23 nt, Synthetic Construct
  source 1..23: mol_type = other RNA
tgtaaacatccccgactggaaga

SEQ ID NO: 63876 - RNA, 18 nt, Synthetic Construct
  source 1..18: mol_type = other RNA
agcaggacggtggccatg

SEQ ID NO: 63877 - RNA, 18 nt, Synthetic Construct
  source 1..18: mol_type = other RNA
agcaggacggtggccatg

SEQ ID NO: 63878 - RNA, 15 nt, Synthetic Construct
  source 1..15: mol_type = other RNA
ctaccgtgcgtagga

SEQ ID NO: 63879 - RNA, 15 nt, Synthetic Construct
  source 1..15: mol_type = other RNA
ctaccgtgcgtagga

SEQ ID NO: 63880 - RNA, 22 nt, Synthetic Construct
  source 1..22: mol_type = other RNA
ctagactgaagctccttgaggt

SEQ ID NO: 63881 - RNA, 22 nt, Synthetic Construct
  source 1..22: mol_type = other RNA
ctagactgaagctccttgaggt

SEQ ID NO: 63882 - RNA, 22 nt, Synthetic Construct
  source 1..22: mol_type = other RNA
taactccttaagcggatctcgc

SEQ ID NO: 63883 - RNA, 22 nt, Synthetic Construct
  source 1..22: mol_type = other RNA
taactccttaagcggatctcgc

SEQ ID NO: 63884 - RNA, 23 nt, Synthetic Construct
  source 1..23: mol_type = other RNA
tcctgtactgagttgccccgaga

SEQ ID NO: 63885 - RNA, 21 nt, Synthetic Construct
  source 1..21: mol_type = other RNA
tgacctatgaattgacagcca

SEQ ID NO: 63886 - RNA, 21 nt, Synthetic Construct
  source 1..21: mol_type = other RNA
tgacctatgaattgacagcca

SEQ ID NO: 63887 - RNA, 23 nt, Synthetic Construct
  source 1..23: mol_type = other RNA
tgtgcaaatccatgcaaaactga

SEQ ID NO: 63888 - RNA, 17 nt, Synthetic Construct
  source 1..17: mol_type = other RNA
ggataactggcttgtgg

SEQ ID NO: 63889 - RNA, 22 nt, Synthetic Construct
  source 1..22: mol_type = other RNA
tgaggtagaagtttgtgctgtt

SEQ ID NO: 63890 - RNA, 22 nt, Synthetic Construct
  source 1..22: mol_type = other RNA
ngaggtagtagattgtatagtt

SEQ ID NO: 63891 - RNA, 23 nt, Synthetic Construct
  source 1..23: mol_type = other RNA
agaggtagtaggttgtgtggttt

SEQ ID NO: 63892 - RNA, 23 nt, Synthetic Construct
  source 1..23: mol_type = other RNA
agaggtagtaggttgtgtggttt

SEQ ID NO: 63893 - RNA, 23 nt, Synthetic Construct
  source 1..23: mol_type = other RNA
tcggatccgtctgagcttggctt

SEQ ID NO: 63894 - RNA, 24 nt, Synthetic Construct
  source 1..24: mol_type = other RNA
tcagcccgtgttcggaagattttc

SEQ ID NO: 63895 - RNA, 24 nt, Synthetic Construct
  source 1..24: mol_type = other RNA
tcagcccgtgttcggaagattttc

SEQ ID NO: 63896 - RNA, 36 nt, Synthetic Construct; identical to SEQ ID NO: 10982
  source 1..36: mol_type = other RNA

SEQ ID NO: 63897 - RNA, 36 nt, Synthetic Construct; identical to SEQ ID NO: 10982
  source 1..36: mol_type = other RNA

SEQ ID NO: 63898 - RNA, 33 nt, Synthetic Construct; identical to SEQ ID NO: 2126
  source 1..33: mol_type = other RNA

SEQ ID NO: 63899 - RNA, 36 nt, Synthetic Construct; identical to SEQ ID NO: 20
  source 1..36: mol_type = other RNA

SEQ ID NO: 63900 - RNA, 36 nt, Synthetic Construct; identical to SEQ ID NO: 20
  source 1..36: mol_type = other RNA

SEQ ID NO: 63901 - RNA, 20 nt, Synthetic Construct
  source 1..20: mol_type = other RNA
tgaggtagaaggttgtatag

SEQ ID NO: 63902 - RNA, 22 nt, Synthetic Construct
  source 1..22: mol_type = other RNA
tctgcccagtgctctgaatgtc

SEQ ID NO: 63903 - RNA, 22 nt, Synthetic Construct
  source 1..22: mol_type = other RNA
tctgcccagtgctctgaatgtc

SEQ ID NO: 63904 - RNA, 22 nt, Synthetic Construct
  source 1..22: mol_type = other RNA
tagcttatcagactgatgttga

SEQ ID NO: 63905 - RNA, 22 nt, Synthetic Construct
  source 1..22: mol_type = other RNA
tagcttatcagactgatgttga

SEQ ID NO: 63906 - RNA, 20 nt, Synthetic Construct
  source 1..20: mol_type = other RNA
cggcggggacggcgattggt

SEQ ID NO: 63907 - RNA, 20 nt, Synthetic Construct
  source 1..20: mol_type = other RNA
cggcggggacggcgattggt

SEQ ID NO: 63908 - RNA, 21 nt, Synthetic Construct
  source 1..21: mol_type = other RNA
cgtgccgtgagtaataatgcg

SEQ ID NO: 63909 - RNA, 20 nt, Synthetic Construct
  source 1..20: mol_type = other RNA
ctgacctatgaattgacagc

SEQ ID NO: 63910 - RNA, 16 nt, Synthetic Construct
  source 1..16: mol_type = other RNA
gtgcagatcttggtgg

SEQ ID NO: 63911 - RNA, 23 nt, Synthetic Construct
  source 1..23: mol_type = other RNA
ggcagcattgtacagggctatgt

SEQ ID NO: 63912 - RNA, 22 nt, Synthetic Construct
  source 1..22: mol_type = other RNA
tgaggtagtaatttgtgctgtt

SEQ ID NO: 63913 - RNA, 22 nt, Synthetic Construct
  source 1..22: mol_type = other RNA
tgaggtagtaatttgtgctgtt

SEQ ID NO: 63914 - RNA, 16 nt, Synthetic Construct
  source 1..16: mol_type = other RNA
gaaattccttgtcggg

SEQ ID NO: 63915 - RNA, 24 nt, Synthetic Construct
  source 1..24: mol_type = other RNA
tgaggtagtaggttgtatagtttt

SEQ ID NO: 63916 - RNA, 32 nt, Synthetic Construct; identical to SEQ ID NO: 5582
  source 1..32: mol_type = other RNA

SEQ ID NO: 63917 - RNA, 22 nt, Synthetic Construct
  source 1..22: mol_type = other RNA
tatcagcacgtaaatattggcg

SEQ ID NO: 63918 - RNA, 22 nt, Synthetic Construct
  source 1..22: mol_type = other RNA
tatcagcacgtaaatattggcg

SEQ ID NO: 63919 - RNA, 15 nt, Synthetic Construct
  source 1..15: mol_type = other RNA
gacgatcagataccg

SEQ ID NO: 63920 - RNA, 27 nt, Synthetic Construct
  source 1..27: mol_type = other RNA
ccccccactgataaatttgactggctt

SEQ ID NO: 63921 - RNA, 22 nt, Synthetic Construct
  source 1..22: mol_type = other RNA
tggggtagtagattgtatagtt

SEQ ID NO: 63922 - RNA, 22 nt, Synthetic Construct
  source 1..22: mol_type = other RNA
tggggtagtagattgtatagtt

SEQ ID NO: 63923 - RNA, 22 nt, Synthetic Construct
  source 1..22: mol_type = other RNA
tgaggtagtaggatgtgtggtt

SEQ ID NO: 63924 - RNA, 20 nt, Synthetic Construct
  source 1..20: mol_type = other RNA
tttcgatggtagtcgccgtg

SEQ ID NO: 63925 - RNA, 16 nt, Synthetic Construct
  source 1..16: mol_type = other RNA
gtctacggccatacaa

SEQ ID NO: 63926 - RNA, 22 nt, Synthetic Construct
  source 1..22: mol_type = other RNA
taactccttaagagaatctcgc

SEQ ID NO: 63927 - RNA, 22 nt, Synthetic Construct
  source 1..22: mol_type = other RNA
taactccttaagagaatctcgc

SEQ ID NO: 63928 - RNA, 27 nt, Synthetic Construct
  source 1..27: mol_type = other RNA
tgaggtagtaggttgtgtggttttttt

SEQ ID NO: 63929 - RNA, 21 nt, Synthetic Construct
  source 1..21: mol_type = other RNA
tggagtgtgacaatggtgttc

SEQ ID NO: 63930 - RNA, 21 nt, Synthetic Construct
  source 1..21: mol_type = other RNA
tggagtgtgacaatggtgttc

SEQ ID NO: 63931 - RNA, 22 nt, Synthetic Construct
  source 1..22: mol_type = other RNA
tgtagtgtttcctaccttatgg

SEQ ID NO: 63932 - RNA, 22 nt, Synthetic Construct
  source 1..22: mol_type = other RNA
tgtagtgtttcctaccttatgg

SEQ ID NO: 63933 - RNA, 20 nt, Synthetic Construct
  source 1..20: mol_type = other RNA
tgaggtagtaggttgtatag

SEQ ID NO: 63934 - RNA, 29 nt, Synthetic Construct
  source 1..29: mol_type = other RNA
tccctggtggtctagtggttaggattcgg

SEQ ID NO: 63935 - RNA, 29 nt, Synthetic Construct
  source 1..29: mol_type = other RNA
tccctggtggtctagtggttaggattcgg

SEQ ID NO: 63936 - RNA, 22 nt, Synthetic Construct
  source 1..22: mol_type = other RNA
aagaagcacgtaaatattggcg

SEQ ID NO: 63937 - RNA, 22 nt, Synthetic Construct
  source 1..22: mol_type = other RNA
cattgcacttgtctcagtctga

SEQ ID NO: 63938 - RNA, 22 nt, Synthetic Construct
  source 1..22: mol_type = other RNA
cattgcacttgtctcagtctga

SEQ ID NO: 63939 - RNA, 24 nt, Synthetic Construct
  source 1..24: mol_type = other RNA
tactagactgaagctccttgaggt

SEQ ID NO: 63940 - RNA, 16 nt, Synthetic Construct
  source 1..16: mol_type = other RNA
agggaacgtgagctgg

SEQ ID NO: 63941 - RNA, 16 nt, Synthetic Construct
  source 1..16: mol_type = other RNA
agggaacgtgagctgg

SEQ ID NO: 63942 - RNA, 23 nt, Synthetic Construct
  source 1..23: mol_type = other RNA
aacggaatcccaaaagcagctgt

SEQ ID NO: 63943 - RNA, 23 nt, Synthetic Construct
  source 1..23: mol_type = other RNA
aacggaatcccaaaagcagctgt

SEQ ID NO: 63944 - RNA, 23 nt, Synthetic Construct
  source 1..23: mol_type = other RNA
cagagtgctgttcgtgcaggtag

SEQ ID NO: 63945 - RNA, 22 nt, Synthetic Construct
  source 1..22: mol_type = other RNA
tgaggtagtagattgcatagtt

SEQ ID NO: 63946 - RNA, 23 nt, Synthetic Construct
  source 1..23: mol_type = other RNA
ttaatgctaatcgtgatagggga

SEQ ID NO: 63947 - RNA, 23 nt, Synthetic Construct
  source 1..23: mol_type = other RNA
tcttggagtaggtcattgggtgt

SEQ ID NO: 63948 - RNA, 22 nt, Synthetic Construct
  source 1..22: mol_type = other RNA
tgaggtagtaatttgtgctgtt

SEQ ID NO: 63949 - RNA, 22 nt, Synthetic Construct
  source 1..22: mol_type = other RNA
tgaggtagtaatttgtgctgtt

SEQ ID NO: 63950 - RNA, 22 nt, Synthetic Construct
  source 1..22: mol_type = other RNA
cattgcacttgtcccggcctgt

SEQ ID NO: 63951 - RNA, 22 nt, Synthetic Construct
  source 1..22: mol_type = other RNA
tgaggtagtaggttgtttagtt

SEQ ID NO: 63952 - RNA, 22 nt, Synthetic Construct
  source 1..22: mol_type = other RNA
tgaggtagtaggttgtttagtt

SEQ ID NO: 63953 - RNA, 22 nt, Synthetic Construct
  source 1..22: mol_type = other RNA
aagaagcacgtaaatattggcg

SEQ ID NO: 63954 - RNA, 22 nt, Synthetic Construct
  source 1..22: mol_type = other RNA
aagaagcacgtaaatattggcg

SEQ ID NO: 63955 - RNA, 20 nt, Synthetic Construct
  source 1..20: mol_type = other RNA
tagcaccatttgaaatcggt

SEQ ID NO: 63956 - RNA, 24 nt, Synthetic Construct
  source 1..24: mol_type = other RNA
tgtaaacatccccggctggaagct

SEQ ID NO: 63957 - RNA, 24 nt, Synthetic Construct
  source 1..24: mol_type = other RNA
tgtaaacatccccggctggaagct

SEQ ID NO: 63958 - RNA, 19 nt, Synthetic Construct
  source 1..19: mol_type = other RNA
ggctggtccgaaggtagtg

SEQ ID NO: 63959 - RNA, 19 nt, Synthetic Construct
  source 1..19: mol_type = other RNA
ggctggtccgaaggtagtg

SEQ ID NO: 63960 - RNA, 22 nt, Synthetic Construct
  source 1..22: mol_type = other RNA
tgaggtagtagtttgtgctgat

SEQ ID NO: 63961 - RNA, 22 nt, Synthetic Construct
  source 1..22: mol_type = other RNA
tgaggtagtagtttgtgctgat

SEQ ID NO: 63962 - RNA, 17 nt, Synthetic Construct
  source 1..17: mol_type = other RNA
caggacggtggccatgg

SEQ ID NO: 63963 - RNA, 17 nt, Synthetic Construct
  source 1..17: mol_type = other RNA
caggacggtggccatgg

SEQ ID NO: 63964 - RNA, 23 nt, Synthetic Construct
  source 1..23: mol_type = other RNA
tggctcagttcagcaggaacagt

SEQ ID NO: 63965 - RNA, 21 nt, Synthetic Construct
  source 1..21: mol_type = other RNA
tgaggtagtaggttgtgtgat

SEQ ID NO: 63966 - RNA, 22 nt, Synthetic Construct
  source 1..22: mol_type = other RNA
tgaggtagtaggttgtggggtt

SEQ ID NO: 63967 - RNA, 22 nt, Synthetic Construct
  source 1..22: mol_type = other RNA
tgaggtagtaggttgtggggtt

SEQ ID NO: 63968 - RNA, 23 nt, Synthetic Construct
  source 1..23: mol_type = other RNA
caaagtgctgttcgtgcaggaag

SEQ ID NO: 63969 - RNA, 23 nt, Synthetic Construct
  source 1..23: mol_type = other RNA
caaagtgctgttcgtgcaggaag

SEQ ID NO: 63970 - RNA, 16 nt, Synthetic Construct
  source 1..16: mol_type = other RNA
tattgcacttgtcccg

SEQ ID NO: 63971 - RNA, 16 nt, Synthetic Construct
  source 1..16: mol_type = other RNA
tattgcacttgtcccg

SEQ ID NO: 63972 - RNA, 22 nt, Synthetic Construct
  source 1..22: mol_type = other RNA
aatgacacgatcactcccgttg

SEQ ID NO: 63973 - RNA, 22 nt, Synthetic Construct
  source 1..22: mol_type = other RNA
aatgacacgatcactcccgttg

SEQ ID NO: 63974 - RNA, 23 nt, Synthetic Construct
  source 1..23: mol_type = other RNA
agcagaattgtacagggctatga

SEQ ID NO: 63975 - RNA, 23 nt, Synthetic Construct
  source 1..23: mol_type = other RNA
agcagaattgtacagggctatga

SEQ ID NO: 63976 - RNA, 22 nt, Synthetic Construct
  source 1..22: mol_type = other RNA
ttcgagtaattcaggataggtt

SEQ ID NO: 63977 - RNA, 22 nt, Synthetic Construct
  source 1..22: mol_type = other RNA
ttcgagtaattcaggataggtt

SEQ ID NO: 63978 - RNA, 24 nt, Synthetic Construct
  source 1..24: mol_type = other RNA
actcacacagaaatcgcacccgtc

SEQ ID NO: 63979 - RNA, 24 nt, Synthetic Construct
  source 1..24: mol_type = other RNA
actcacacagaaatcgcacccgtc

SEQ ID NO: 63980 - RNA, 20 nt, Synthetic Construct
  source 1..20: mol_type = other RNA
agcagcattgtacagggcta

SEQ ID NO: 63981 - RNA, 31 nt, Synthetic Construct
  source 1..31: mol_type = other RNA
gtttccgtagtgtagtggttatcacgttcgc

SEQ ID NO: 63982 - RNA, 31 nt, Synthetic Construct; identical to SEQ ID NO: 63981
  source 1..31: mol_type = other RNA

SEQ ID NO: 63983 - RNA, 22 nt, Synthetic Construct
  source 1..22: mol_type = other RNA
ttgtacatggtaggctttcatt

SEQ ID NO: 63984 - RNA, 17 nt, Synthetic Construct
  source 1..17: mol_type = other RNA
aggaattgacggaaggg

SEQ ID NO: 63985 - RNA, 17 nt, Synthetic Construct
  source 1..17: mol_type = other RNA
aggaattgacggaaggg

SEQ ID NO: 63986 - RNA, 29 nt, Synthetic Construct
  source 1..29: mol_type = other RNA
gatgcgaaagcaggtcaaagtgatccggc

SEQ ID NO: 63987 - RNA, 29 nt, Synthetic Construct
  source 1..29: mol_type = other RNA
gatgcgaaagcaggtcaaagtgatccggc

SEQ ID NO: 63988 - RNA, 17 nt, Synthetic Construct
  source 1..17: mol_type = other RNA
tggccgttcttagttgg

SEQ ID NO: 63989 - RNA, 22 nt, Synthetic Construct
  source 1..22: mol_type = other RNA
tgaggtagtaggttgtatagat

SEQ ID NO: 63990 - RNA, 27 nt, Synthetic Construct
  source 1..27: mol_type = other RNA
cccccccactgctaaatttgactggct

SEQ ID NO: 63991 - RNA, 23 nt, Synthetic Construct
  source 1..23: mol_type = other RNA
agcagcgttgtacagggctatga

SEQ ID NO: 63992 - RNA, 23 nt, Synthetic Construct
  source 1..23: mol_type = other RNA
agcagcgttgtacagggctatga

SEQ ID NO: 63993 - RNA, 18 nt, Synthetic Construct
  source 1..18: mol_type = other RNA
gacgaggtggccgagtgg

SEQ ID NO: 63994 - RNA, 21 nt, Synthetic Construct
  source 1..21: mol_type = other RNA
tgaggtagtaggatgtgtggt

SEQ ID NO: 63995 - RNA, 24 nt, Synthetic Construct
  source 1..24: mol_type = other RNA
ggtaaacatccccgactggaagct

SEQ ID NO: 63996 - RNA, 26 nt, Synthetic Construct
  source 1..26: mol_type = other RNA
ccccccactgctaaatttgactggta

SEQ ID NO: 63997 - RNA, 23 nt, Synthetic Construct
  source 1..23: mol_type = other RNA
caaagtgctgttcgtgcaagtag

SEQ ID NO: 63998 - RNA, 24 nt, Synthetic Construct
  source 1..24: mol_type = other RNA
tggctcagttcagcaggaacagtt

SEQ ID NO: 63999 - RNA, 24 nt, Synthetic Construct
  source 1..24: mol_type = other RNA
tggctcagttcagcaggaacagtt

SEQ ID NO: 64000 - RNA, 24 nt, Synthetic Construct
  source 1..24: mol_type = other RNA
acctggcatacaatgtagatttct

SEQ ID NO: 64001 - RNA, 20 nt, Synthetic Construct
  source 1..20: mol_type = other RNA
tggaatgtaaagaagtatgt

SEQ ID NO: 64002 - RNA, 20 nt, Synthetic Construct
  source 1..20: mol_type = other RNA
tggaatgtaaagaagtatgt

SEQ ID NO: 64003 - RNA, 21 nt, Synthetic Construct
  source 1..21: mol_type = other RNA
aggagtgtgacaatggtgttt

SEQ ID NO: 64004 - RNA, 21 nt, Synthetic Construct
  source 1..21: mol_type = other RNA
aggagtgtgacaatggtgttt

SEQ ID NO: 64005 - RNA, 21 nt, Synthetic Construct
  source 1..21: mol_type = other RNA
gtcagtttgtcaaatacccca

SEQ ID NO: 64006 - RNA, 20 nt, Synthetic Construct
  source 1..20: mol_type = other RNA
tgaggtagtaggttatgtgg

SEQ ID NO: 64007 - RNA, 16 nt, Synthetic Construct
  source 1..16: mol_type = other RNA
tcagtagctcgaggaa

SEQ ID NO: 64008 - RNA, 28 nt, Synthetic Construct
  source 1..28: mol_type = other RNA
gcggtataccgaagctctaggtgcggca

SEQ ID NO: 64009 - RNA, 28 nt, Synthetic Construct
  source 1..28: mol_type = other RNA
gcggtataccgaagctctaggtgcggca

SEQ ID NO: 64010 - RNA, 22 nt, Synthetic Construct
  source 1..22: mol_type = other RNA
tggaatgtaaagaagcatgtat

SEQ ID NO: 64011 - RNA, 32 nt, Synthetic Construct; identical to SEQ ID NO: 1128
  source 1..32: mol_type = other RNA

SEQ ID NO: 64012 - RNA, 21 nt, Synthetic Construct
  source 1..21: mol_type = other RNA
cagtagtctgcacattggtta

SEQ ID NO: 64013 - RNA, 22 nt, Synthetic Construct
  source 1..22: mol_type = other RNA
tgaggtagtaggttgtgtggta

SEQ ID NO: 64014 - RNA, 30 nt, Synthetic Construct; identical to SEQ ID NO: 11302
  source 1..30: mol_type = other RNA

SEQ ID NO: 64015 - RNA, 30 nt, Synthetic Construct; identical to SEQ ID NO: 11302
  source 1..30: mol_type = other RNA

SEQ ID NO: 64016 - RNA, 22 nt, Synthetic Construct
  source 1..22: mol_type = other RNA
tatcagcacgtaaatattggcg

SEQ ID NO: 64017 - RNA, 22 nt, Synthetic Construct
  source 1..22: mol_type = other RNA
tatcagcacgtaaatattggcg

SEQ ID NO: 64018 - RNA, 16 nt, Synthetic Construct
  source 1..16: mol_type = other RNA
gactacggccatacca

SEQ ID NO: 64019 - RNA, 24 nt, Synthetic Construct
  source 1..24: mol_type = other RNA
gctaaacctagccccaaacccact

SEQ ID NO: 64020 - RNA, 18 nt, Synthetic Construct
  source 1..18: mol_type = other RNA
gctgtgatggccgagtgg

SEQ ID NO: 64021 - RNA, 28 nt, Synthetic Construct
  source 1..28: mol_type = other RNA
gcattgtggttcagtggtagaattctcg

SEQ ID NO: 64022 - RNA, 28 nt, Synthetic Construct
  source 1..28: mol_type = other RNA
gcattgtggttcagtggtagaattctcg

SEQ ID NO: 64023 - RNA, 17 nt, Synthetic Construct
  source 1..17: mol_type = other RNA
tcagtagctcgaggaaa

SEQ ID NO: 64024 - RNA, 17 nt, Synthetic Construct
  source 1..17: mol_type = other RNA
tcagtagctcgaggaaa

SEQ ID NO: 64025 - RNA, 22 nt, Synthetic Construct
  source 1..22: mol_type = other RNA
cagcagcacgtaaatattggcg

SEQ ID NO: 64026 - RNA, 22 nt, Synthetic Construct
  source 1..22: mol_type = other RNA
cagcagcacgtaaatattggcg

SEQ ID NO: 64027 - RNA, 21 nt, Synthetic Construct
  source 1..21: mol_type = other RNA
tggtagactatggaacgtagg

SEQ ID NO: 64028 - RNA, 35 nt, Synthetic Construct; identical to SEQ ID NO: 12948
  source 1..35: mol_type = other RNA

SEQ ID NO: 64029 - RNA, 35 nt, Synthetic Construct; identical to SEQ ID NO: 12948
  source 1..35: mol_type = other RNA

SEQ ID NO: 64030 - RNA, 18 nt, Synthetic Construct
  source 1..18: mol_type = other RNA
ttctacagtccgacgatc

SEQ ID NO: 64031 - RNA, 18 nt, Synthetic Construct
  source 1..18: mol_type = other RNA
ttctacagtccgacgatc

SEQ ID NO: 64032 - RNA, 21 nt, Synthetic Construct
  source 1..21: mol_type = other RNA
acacatgcaagtcgaacggta

SEQ ID NO: 64033 - RNA, 21 nt, Synthetic Construct
  source 1..21: mol_type = other RNA
acacatgcaagtcgaacggta

SEQ ID NO: 64034 - RNA, 22 nt, Synthetic Construct
  source 1..22: mol_type = other RNA
catcgggaatgtcgtgtccgcc

SEQ ID NO: 64035 - RNA, 22 nt, Synthetic Construct
  source 1..22: mol_type = other RNA
catcgggaatgtcgtgtccgcc

SEQ ID NO: 64036 - RNA, 23 nt, Synthetic Construct
  source 1..23: mol_type = other RNA
agggctgggtcggtcgggctggg

SEQ ID NO: 64037 - RNA, 23 nt, Synthetic Construct
  source 1..23: mol_type = other RNA
agggctgggtcggtcgggctggg

SEQ ID NO: 64038 - RNA, 20 nt, Synthetic Construct
  source 1..20: mol_type = other RNA
ctggacttggagtcagaagg

SEQ ID NO: 64039 - RNA, 23 nt, Synthetic Construct
  source 1..23: mol_type = other RNA
agcagcattgcacagggctatga

SEQ ID NO: 64040 - RNA, 19 nt, Synthetic Construct
  source 1..19: mol_type = other RNA
gaagaccctgttgagcttg

SEQ ID NO: 64041 - RNA, 20 nt, Synthetic Construct
  source 1..20: mol_type = other RNA
ccttggggttgtaggaccac

SEQ ID NO: 64042 - RNA, 20 nt, Synthetic Construct
  source 1..20: mol_type = other RNA
ccttggggttgtaggaccac

SEQ ID NO: 64043 - RNA, 23 nt, Synthetic Construct
  source 1..23: mol_type = other RNA
aatgacacgatcactcccgttga

SEQ ID NO: 64044 - RNA, 24 nt, Synthetic Construct
  source 1..24: mol_type = other RNA
tgtcagtttgtcaaataccccaac

SEQ ID NO: 64045 - RNA, 23 nt, Synthetic Construct
  source 1..23: mol_type = other RNA
tggcagtgtcttagctggttgtt

SEQ ID NO: 64046 - RNA, 27 nt, Synthetic Construct
  source 1..27: mol_type = other RNA
cctcccactgctaaatttgactggctt

SEQ ID NO: 64047 - RNA, 23 nt, Synthetic Construct
  source 1..23: mol_type = other RNA
ggcagcattgtacagggctatga

SEQ ID NO: 64048 - RNA, 23 nt, Synthetic Construct
  source 1..23: mol_type = other RNA
ggcagcattgtacagggctatga

SEQ ID NO: 64049 - RNA, 23 nt, Synthetic Construct
  source 1..23: mol_type = other RNA
atatcggaacgtgcccagtcgtg

SEQ ID NO: 64050 - RNA, 24 nt, Synthetic Construct
  source 1..24: mol_type = other RNA
caacggaatcccaaaagcagcttt

SEQ ID NO: 64051 - RNA, 24 nt, Synthetic Construct
  source 1..24: mol_type = other RNA
caacggaatcccaaaagcagcttt

SEQ ID NO: 64052 - RNA, 22 nt, Synthetic Construct
  source 1..22: mol_type = other RNA
cgtaccgtgagtaataatgcgt

SEQ ID NO: 64053 - RNA, 22 nt, Synthetic Construct
  source 1..22: mol_type = other RNA
cgtaccgtgagtaataatgcgt

SEQ ID NO: 64054 - RNA, 22 nt, Synthetic Construct
  source 1..22: mol_type = other RNA
tcctgaactgagctgccccgag

SEQ ID NO: 64055 - RNA, 18 nt, Synthetic Construct
  source 1..18: mol_type = other RNA
atcccggacgagccccca

SEQ ID NO: 64056 - RNA, 18 nt, Synthetic Construct
  source 1..18: mol_type = other RNA
atcccggacgagccccca

SEQ ID NO: 64057 - RNA, 23 nt, Synthetic Construct
  source 1..23: mol_type = other RNA
tagtaatacgacgtacttagtgt

SEQ ID NO: 64058 - RNA, 25 nt, Synthetic Construct
  source 1..25: mol_type = other RNA
atgaggatatgagatcgagacgaca

SEQ ID NO: 64059 - RNA, 17 nt, Synthetic Construct
  source 1..17: mol_type = other RNA
atagggaacgtgagctg

SEQ ID NO: 64060 - RNA, 17 nt, Synthetic Construct
  source 1..17: mol_type = other RNA
atagggaacgtgagctg

SEQ ID NO: 64061 - RNA, 30 nt, Synthetic Construct; identical to SEQ ID NO: 11302
  source 1..30: mol_type = other RNA

SEQ ID NO: 64062 - RNA, 18 nt, Synthetic Construct
  source 1..18: mol_type = other RNA
agttggtccgagtgttgt

SEQ ID NO: 64063 - RNA, 21 nt, Synthetic Construct
  source 1..21: mol_type = other RNA
tgaggtagtggattgtatagt

SEQ ID NO: 64064 - RNA, 27 nt, Synthetic Construct
  source 1..27: mol_type = other RNA
gaaaaagtcatggaggccatggggttg

SEQ ID NO: 64065 - RNA, 27 nt, Synthetic Construct
  source 1..27: mol_type = other RNA
gaaaaagtcatggaggccatggggttg

SEQ ID NO: 64066 - RNA, 21 nt, Synthetic Construct
  source 1..21: mol_type = other RNA
ccctgtactgagctgccccga

SEQ ID NO: 64067 - RNA, 23 nt, Synthetic Construct
  source 1..23: mol_type = other RNA
ttatggtttgcctgggactgaaa

SEQ ID NO: 64068 - RNA, 23 nt, Synthetic Construct
  source 1..23: mol_type = other RNA
ttatggtttgcctgggactgaaa

SEQ ID NO: 64069 - RNA, 21 nt, Synthetic Construct
  source 1..21: mol_type = other RNA
taaggtagtaggttgtatagt

SEQ ID NO: 64070 - RNA, 21 nt, Synthetic Construct
  source 1..21: mol_type = other RNA
taaggtagtaggttgtatagt

SEQ ID NO: 64071 - RNA, 29 nt, Synthetic Construct
  source 1..29: mol_type = other RNA
agtaaggtcagctaaataagctatcgggc

SEQ ID NO: 64072 - RNA, 29 nt, Synthetic Construct
  source 1..29: mol_type = other RNA
agtaaggtcagctaaataagctatcgggc

SEQ ID NO: 64073 - RNA, 22 nt, Synthetic Construct
  source 1..22: mol_type = other RNA
ctttcagtcggatgtttacagt

SEQ ID NO: 64074 - RNA, 22 nt, Synthetic Construct
  source 1..22: mol_type = other RNA
ctttcagtcggatgtttacagt

SEQ ID NO: 64075 - RNA, 29 nt, Synthetic Construct
  source 1..29: mol_type = other RNA
gcattgtggttcagtggtagaattctcgc

SEQ ID NO: 64076 - RNA, 29 nt, Synthetic Construct
  source 1..29: mol_type = other RNA
gcattgtggttcagtggtagaattctcgc

SEQ ID NO: 64077 - RNA, 22 nt, Synthetic Construct
  source 1..22: mol_type = other RNA
tgaggtagcagattgtatagtt

SEQ ID NO: 64078 - RNA, 22 nt, Synthetic Construct
  source 1..22: mol_type = other RNA
tgaggtagcagattgtatagtt

SEQ ID NO: 64079 - RNA, 29 nt, Synthetic Construct
  source 1..29: mol_type = other RNA
ccccccccactgctaaatttgactggctt

SEQ ID NO: 64080 - RNA, 27 nt, Synthetic Construct
  source 1..27: mol_type = other RNA
ccccccactgccaaatttgactggctt

SEQ ID NO: 64081 - RNA, 18 nt, Synthetic Construct
  source 1..18: mol_type = other RNA
cctcgcgcgattggagcg

SEQ ID NO: 64082 - RNA, 19 nt, Synthetic Construct
  source 1..19: mol_type = other RNA
gttctacagtccgacgatc

SEQ ID NO: 64083 - RNA, 19 nt, Synthetic Construct
  source 1..19: mol_type = other RNA
gttctacagtccgacgatc

SEQ ID NO: 64084 - RNA, 22 nt, Synthetic Construct
  source 1..22: mol_type = other RNA
gtacagtactgtgataactgaa

SEQ ID NO: 64085 - RNA, 20 nt, Synthetic Construct
  source 1..20: mol_type = other RNA
tggggtagtaggttgtgtgg

SEQ ID NO: 64086 - RNA, 23 nt, Synthetic Construct
  source 1..23: mol_type = other RNA
tcccccaggtgtgattctgattt

SEQ ID NO: 64087 - RNA, 23 nt, Synthetic Construct
  source 1..23: mol_type = other RNA
tgaggtagtaggttgtatggttt

SEQ ID NO: 64088 - RNA, 23 nt, Synthetic Construct
  source 1..23: mol_type = other RNA
tgaggtagtaggttgtatggttt

SEQ ID NO: 64089 - RNA, 25 nt, Synthetic Construct
  source 1..25: mol_type = other RNA
tgaggtagtaggttgtgtggttatt

SEQ ID NO: 64090 - RNA, 25 nt, Synthetic Construct
  source 1..25: mol_type = other RNA
tgaggtagtaggttgtgtggttatt

SEQ ID NO: 64091 - RNA, 22 nt, Synthetic Construct
  source 1..22: mol_type = other RNA
ttaggtagtagtttgtgctgtt

SEQ ID NO: 64092 - RNA, 22 nt, Synthetic Construct
  source 1..22: mol_type = other RNA
ttaggtagtagtttgtgctgtt

SEQ ID NO: 64093 - RNA, 32 nt, Synthetic Construct; identical to SEQ ID NO: 1238
  source 1..32: mol_type = other RNA

SEQ ID NO: 64094 - RNA, 21 nt, Synthetic Construct
  source 1..21: mol_type = other RNA
cgtaccgtgagtaatagtgcg

SEQ ID NO: 64095 - RNA, 21 nt, Synthetic Construct
  source 1..21: mol_type = other RNA
cgtaccgtgagtaatagtgcg

SEQ ID NO: 64096 - RNA, 23 nt, Synthetic Construct
  source 1..23: mol_type = other RNA
cgcatcccctagggcattggtgt

SEQ ID NO: 64097 - RNA, 23 nt, Synthetic Construct
  source 1..23: mol_type = other RNA
cgcatcccctagggcattggtgt

SEQ ID NO: 64098 - RNA, 21 nt, Synthetic Construct
  source 1..21: mol_type = other RNA
aggtagatagaacaggtcttg

SEQ ID NO: 64099 - RNA, 21 nt, Synthetic Construct
  source 1..21: mol_type = other RNA
aggtagatagaacaggtcttg

SEQ ID NO: 64100 - RNA, 22 nt, Synthetic Construct
  source 1..22: mol_type = other RNA
taactcctaaagcgaatctcgc

SEQ ID NO: 64101 - RNA, 22 nt, Synthetic Construct
  source 1..22: mol_type = other RNA
taactcctaaagcgaatctcgc

SEQ ID NO: 64102 - RNA, 17 nt, Synthetic Construct
  source 1..17: mol_type = other RNA
ttggagggcaagtctgg

SEQ ID NO: 64103 - RNA, 19 nt, Synthetic Construct
  source 1..19: mol_type = other RNA
gctattgacgaccgtaccg

SEQ ID NO: 64104 - RNA, 19 nt, Synthetic Construct
  source 1..19: mol_type = other RNA
gctattgacgaccgtaccg

SEQ ID NO: 64105 - RNA, 22 nt, Synthetic Construct
  source 1..22: mol_type = other RNA
catagcacttgtctcggtctga

SEQ ID NO: 64106 - RNA, 22 nt, Synthetic Construct
  source 1..22: mol_type = other RNA
catagcacttgtctcggtctga

SEQ ID NO: 64107 - RNA, 22 nt, Synthetic Construct
  source 1..22: mol_type = other RNA
cattgcacttgcctcggtctga

SEQ ID NO: 64108 - RNA, 22 nt, Synthetic Construct
  source 1..22: mol_type = other RNA
cattgcacttgcctcggtctga

SEQ ID NO: 64109 - RNA, 16 nt, Synthetic Construct
  source 1..16: mol_type = other RNA
gtctacggccacacca

SEQ ID NO: 64110 - RNA, 17 nt, Synthetic Construct
  source 1..17: mol_type = other RNA
cagtagctcgaggaaaa

SEQ ID NO: 64111 - RNA, 25 nt, Synthetic Construct
  source 1..25: mol_type = other RNA
ttggggatatgagatcgagacgaca

SEQ ID NO: 64112 - RNA, 25 nt, Synthetic Construct
  source 1..25: mol_type = other RNA
ttggggatatgagatcgagacgaca

SEQ ID NO: 64113 - RNA, 23 nt, Synthetic Construct
  source 1..23: mol_type = other RNA
gtctttgttcgattccgttgagt

SEQ ID NO: 64114 - RNA, 23 nt, Synthetic Construct
  source 1..23: mol_type = other RNA
gtctttgttcgattccgttgagt

SEQ ID NO: 64115 - RNA, 21 nt, Synthetic Construct
  source 1..21: mol_type = other RNA
ggaggggcagagagcgagact

SEQ ID NO: 64116 - RNA, 22 nt, Synthetic Construct
  source 1..22: mol_type = other RNA
tgaggtagtaggttgtacagtt

SEQ ID NO: 64117 - RNA, 21 nt, Synthetic Construct
  source 1..21: mol_type = other RNA
tagcagcacataatggtttgt

SEQ ID NO: 64118 - RNA, 21 nt, Synthetic Construct
  source 1..21: mol_type = other RNA
tagcagcacataatggtttgt

SEQ ID NO: 64119 - RNA, 20 nt, Synthetic Construct
  source 1..20: mol_type = other RNA
aaaccgttaccattactgag

SEQ ID NO: 64120 - RNA, 20 nt, Synthetic Construct
  source 1..20: mol_type = other RNA
aaaccgttaccattactgag

SEQ ID NO: 64121 - RNA, 23 nt, Synthetic Construct
  source 1..23: mol_type = other RNA
tggtaattcgacgtacttagtgt

SEQ ID NO: 64122 - RNA, 16 nt, Synthetic Construct
  source 1..16: mol_type = other RNA
tggccgtcgtcagctc

SEQ ID NO: 64123 - RNA, 16 nt, Synthetic Construct
  source 1..16: mol_type = other RNA
tggccgtcgtcagctc

SEQ ID NO: 64124 - RNA, 22 nt, Synthetic Construct
  source 1..22: mol_type = other RNA
tgaggtggtaggttgtatagtt

SEQ ID NO: 64125 - RNA, 22 nt, Synthetic Construct
  source 1..22: mol_type = other RNA
tgaggtggtaggttgtatagtt

SEQ ID NO: 64126 - RNA, 20 nt, Synthetic Construct
  source 1..20: mol_type = other RNA
tccctgtcctccaggagctc

SEQ ID NO: 64127 - RNA, 22 nt, Synthetic Construct
  source 1..22: mol_type = other RNA
tgtagtgttccctactttatgg

SEQ ID NO: 64128 - RNA, 27 nt, Synthetic Construct
  source 1..27: mol_type = other RNA
ccgtgtgaaagtaggtcatcgtcaggc

SEQ ID NO: 64129 - RNA, 21 nt, Synthetic Construct
  source 1..21: mol_type = other RNA
agctacatctggctactgggt

SEQ ID NO: 64130 - RNA, 21 nt, Synthetic Construct
  source 1..21: mol_type = other RNA
agctacatctggctactgggt

SEQ ID NO: 64131 - RNA, 22 nt, Synthetic Construct
  source 1..22: mol_type = other RNA
tgaggtagtagtttgtgcagtt

SEQ ID NO: 64132 - RNA, 21 nt, Synthetic Construct
  source 1..21: mol_type = other RNA
tgaggcagtaggttgtatagt

SEQ ID NO: 64133 - RNA, 19 nt, Synthetic Construct
  source 1..19: mol_type = other RNA
tagcagcacgtaaatattg

SEQ ID NO: 64134 - RNA, 19 nt, Synthetic Construct
  source 1..19: mol_type = other RNA
tagcagcacgtaaatattg

SEQ ID NO: 64135 - RNA, 23 nt, Synthetic Construct
  source 1..23: mol_type = other RNA
caaagtgctgctcgtgcaggtag

SEQ ID NO: 64136 - RNA, 23 nt, Synthetic Construct
  source 1..23: mol_type = other RNA
caaagtgctgctcgtgcaggtag

SEQ ID NO: 64137 - RNA, 24 nt, Synthetic Construct
  source 1..24: mol_type = other RNA
tgaggtaggaggttgtatagttgt

SEQ ID NO: 64138 - RNA, 16 nt, Synthetic Construct
  source 1..16: mol_type = other RNA
ggccgttcttagttgg

SEQ ID NO: 64139 - RNA, 16 nt, Synthetic Construct
  source 1..16: mol_type = other RNA
ggccgttcttagttgg

SEQ ID NO: 64140 - RNA, 23 nt, Synthetic Construct
  source 1..23: mol_type = other RNA
tgggtttacgttgggagaactta

SEQ ID NO: 64141 - RNA, 22 nt, Synthetic Construct
  source 1..22: mol_type = other RNA
tcagtgcatcacagaactttgt

SEQ ID NO: 64142 - RNA, 23 nt, Synthetic Construct
  source 1..23: mol_type = other RNA
tggtaatacgacgtacatagtgt

SEQ ID NO: 64143 - RNA, 23 nt, Synthetic Construct
  source 1..23: mol_type = other RNA
tggtaatacgacgtacatagtgt

SEQ ID NO: 64144 - RNA, 22 nt, Synthetic Construct
  source 1..22: mol_type = other RNA
tagcatcacgtaaatattggcg

SEQ ID NO: 64145 - RNA, 22 nt, Synthetic Construct
  source 1..22: mol_type = other RNA
tagcatcacgtaaatattggcg

SEQ ID NO: 64146 - RNA, 23 nt, Synthetic Construct
  source 1..23: mol_type = other RNA
agcggcattgtacagggctatga

SEQ ID NO: 64147 - RNA, 21 nt, Synthetic Construct
  source 1..21: mol_type = other RNA
tgaggtagtagactgtatagt

SEQ ID NO: 64148 - RNA, 21 nt, Synthetic Construct
  source 1..21: mol_type = other RNA
tgaggtagtagactgtatagt

SEQ ID NO: 64149 - RNA, 23 nt, Synthetic Construct
  source 1..23: mol_type = other RNA
aacggaatcccaaaagcagctgt

SEQ ID NO: 64150 - RNA, 20 nt, Synthetic Construct
  source 1..20: mol_type = other RNA
cagagttctacagtccgacg

SEQ ID NO: 64151 - RNA, 20 nt, Synthetic Construct
  source 1..20: mol_type = other RNA
cagagttctacagtccgacg

SEQ ID NO: 64152 - RNA, 23 nt, Synthetic Construct
  source 1..23: mol_type = other RNA
caacggaatcccagaagcagctg

SEQ ID NO: 64153 - RNA, 22 nt, Synthetic Construct
  source 1..22: mol_type = other RNA
tgtagtgtctcctactttatgg

SEQ ID NO: 64154 - RNA, 22 nt, Synthetic Construct
  source 1..22: mol_type = other RNA
tgtagtgtctcctactttatgg

SEQ ID NO: 64155 - RNA, 23 nt, Synthetic Construct
  source 1..23: mol_type = other RNA
tcactgatcgagtcgtcctgcgc

SEQ ID NO: 64156 - RNA, 23 nt, Synthetic Construct
  source 1..23: mol_type = other RNA
tcactgatcgagtcgtcctgcgc

SEQ ID NO: 64157 - RNA, 22 nt, Synthetic Construct
  source 1..22: mol_type = other RNA
ttaatgctaatcgtgatagggg

SEQ ID NO: 64158 - RNA, 23 nt, Synthetic Construct
  source 1..23: mol_type = other RNA
tggtaattcgacgtacttagtgt

SEQ ID NO: 64159 - RNA, 23 nt, Synthetic Construct
  source 1..23: mol_type = other RNA
tggtaattcgacgtacttagtgt

SEQ ID NO: 64160 - RNA, 22 nt, Synthetic Construct
  source 1..22: mol_type = other RNA
tactgcacttgtcccggcctgt

SEQ ID NO: 64161 - RNA, 26 nt, Synthetic Construct
  source 1..26: mol_type = other RNA
tgaggtagtaggttgtgtggtttttt

SEQ ID NO: 64162 - RNA, 22 nt, Synthetic Construct
  source 1..22: mol_type = other RNA
ccactgccccaggtgctgctgg

SEQ ID NO: 64163 - RNA, 22 nt, Synthetic Construct
  source 1..22: mol_type = other RNA
ccactgccccaggtgctgctgg

SEQ ID NO: 64164 - RNA, 31 nt, Synthetic Construct; identical to SEQ ID NO: 7160
  source 1..31: mol_type = other RNA

SEQ ID NO: 64165 - RNA, 22 nt, Synthetic Construct
  source 1..22: mol_type = other RNA
tggaatgtaaagaagtatgcat

SEQ ID NO: 64166 - RNA, 22 nt, Synthetic Construct
  source 1..22: mol_type = other RNA
tgaggtaatagtttgtgctgtt

SEQ ID NO: 64167 - RNA, 27 nt, Synthetic Construct
  source 1..27: mol_type = other RNA
cctcccactgctaaatttgactggctt

SEQ ID NO: 64168 - RNA, 27 nt, Synthetic Construct
  source 1..27: mol_type = other RNA
cctcccactgctaaatttgactggctt

SEQ ID NO: 64169 - RNA, 22 nt, Synthetic Construct
  source 1..22: mol_type = other RNA
caaagaattctccttttgggct

SEQ ID NO: 64170 - RNA, 22 nt, Synthetic Construct
  source 1..22: mol_type = other RNA
caaagaattctccttttgggct

SEQ ID NO: 64171 - RNA, 22 nt, Synthetic Construct
  source 1..22: mol_type = other RNA
tagcaccatctgaaatcggtta

SEQ ID NO: 64172 - RNA, 22 nt, Synthetic Construct
  source 1..22: mol_type = other RNA
tgtggtagtaggttgtatagtt

SEQ ID NO: 64173 - RNA, 15 nt, Synthetic Construct
  source 1..15: mol_type = other RNA
gcgggagtaactatg

SEQ ID NO: 64174 - RNA, 21 nt, Synthetic Construct
  source 1..21: mol_type = other RNA
aggttccggataagtagagcc

SEQ ID NO: 64175 - RNA, 21 nt, Synthetic Construct
  source 1..21: mol_type = other RNA
aggttccggataagtagagcc

SEQ ID NO: 64176 - RNA, 16 nt, Synthetic Construct
  source 1..16: mol_type = other RNA
tggccgtcgtcagctc

SEQ ID NO: 64177 - RNA, 16 nt, Synthetic Construct
  source 1..16: mol_type = other RNA
tggccgtcgtcagctc

SEQ ID NO: 64178 - RNA, 22 nt, Synthetic Construct
  source 1..22: mol_type = other RNA
gtagtgtttcctactttatgga

SEQ ID NO: 64179 - RNA, 22 nt, Synthetic Construct
  source 1..22: mol_type = other RNA
gtagtgtttcctactttatgga

SEQ ID NO: 64180 - RNA, 24 nt, Synthetic Construct
  source 1..24: mol_type = other RNA
agcaacattgtctgctgggtttct

SEQ ID NO: 64181 - RNA, 24 nt, Synthetic Construct
  source 1..24: mol_type = other RNA
agcaacattgtctgctgggtttct

SEQ ID NO: 64182 - RNA, 21 nt, Synthetic Construct
  source 1..21: mol_type = other RNA
aggttccggataagtaaagcc

SEQ ID NO: 64183 - RNA, 21 nt, Synthetic Construct
  source 1..21: mol_type = other RNA
aggttccggataagtaaagcc

SEQ ID NO: 64184 - RNA, 21 nt, Synthetic Construct
  source 1..21: mol_type = other RNA
tgaggtagtagatcgtatagt

SEQ ID NO: 64185 - RNA, 32 nt, Synthetic Construct; identical to SEQ ID NO: 1128
  source 1..32: mol_type = other RNA

SEQ ID NO: 64186 - RNA, 32 nt, Synthetic Construct; identical to SEQ ID NO: 1128
  source 1..32: mol_type = other RNA

SEQ ID NO: 64187 - RNA, 22 nt, Synthetic Construct
  source 1..22: mol_type = other RNA
tgggatgagggattgaagtgga

SEQ ID NO: 64188 - RNA, 22 nt, Synthetic Construct
  source 1..22: mol_type = other RNA
taacactgtctggtaacgatgt

SEQ ID NO: 64189 - RNA, 22 nt, Synthetic Construct
  source 1..22: mol_type = other RNA
taacactgtctggtaacgatgt

SEQ ID NO: 64190 - RNA, 24 nt, Synthetic Construct
  source 1..24: mol_type = other RNA
tgtaaacatccccgactgggagct

SEQ ID NO: 64191 - RNA, 24 nt, Synthetic Construct
  source 1..24: mol_type = other RNA
tgtaaacatccccgactgggagct

SEQ ID NO: 64192 - RNA, 33 nt, Synthetic Construct; identical to SEQ ID NO: 33377
  source 1..33: mol_type = other RNA

SEQ ID NO: 64193 - RNA, 22 nt, Synthetic Construct
  source 1..22: mol_type = other RNA
caacggaatcccaaaagcagct

SEQ ID NO: 64194 - RNA, 22 nt, Synthetic Construct
  source 1..22: mol_type = other RNA
caacggaatcccaaaagcagct

SEQ ID NO: 64195 - RNA, 21 nt, Synthetic Construct
  source 1..21: mol_type = other RNA
tcctatactgagctgccccga

SEQ ID NO: 64196 - RNA, 16 nt, Synthetic Construct
  source 1..16: mol_type = other RNA
agtcaggatgttggct

SEQ ID NO: 64197 - RNA, 19 nt, Synthetic Construct
  source 1..19: mol_type = other RNA
cacatgcaagtcgaacggt

SEQ ID NO: 64198 - RNA, 22 nt, Synthetic Construct
  source 1..22: mol_type = other RNA
cattgcacttgtctcggtccga

SEQ ID NO: 64199 - RNA, 27 nt, Synthetic Construct
  source 1..27: mol_type = other RNA
ccccccactgctaaatttgacaggctt

SEQ ID NO: 64200 - RNA, 27 nt, Synthetic Construct
  source 1..27: mol_type = other RNA
ccccccactgctaaatttgacaggctt

SEQ ID NO: 64201 - RNA, 23 nt, Synthetic Construct
  source 1..23: mol_type = other RNA
ttatggtttgcctgggactgagg

SEQ ID NO: 64202 - RNA, 23 nt, Synthetic Construct
  source 1..23: mol_type = other RNA
caaagtgctcatagtgcaggtag

SEQ ID NO: 64203 - RNA, 23 nt, Synthetic Construct
  source 1..23: mol_type = other RNA
caaagtgctcatagtgcaggtag

SEQ ID NO: 64204 - RNA, 21 nt, Synthetic Construct
  source 1..21: mol_type = other RNA
gctttgatccggagatttccg

SEQ ID NO: 64205 - RNA, 22 nt, Synthetic Construct
  source 1..22: mol_type = other RNA
taaccccttaagcgaatctcgc

SEQ ID NO: 64206 - RNA, 22 nt, Synthetic Construct
  source 1..22: mol_type = other RNA
taaccccttaagcgaatctcgc

SEQ ID NO: 64207 - RNA, 21 nt, Synthetic Construct
  source 1..21: mol_type = other RNA
tggagcgtgacaatggtgttt

SEQ ID NO: 64208 - RNA, 21 nt, Synthetic Construct
  source 1..21: mol_type = other RNA
tggagcgtgacaatggtgttt

SEQ ID NO: 64209 - RNA, 22 nt, Synthetic Construct
  source 1..22: mol_type = other RNA
actggacttggagtcagaaggc

SEQ ID NO: 64210 - RNA, 22 nt, Synthetic Construct
  source 1..22: mol_type = other RNA
accacagggtagaaccacggaa

SEQ ID NO: 64211 - RNA, 22 nt, Synthetic Construct
  source 1..22: mol_type = other RNA
accacagggtagaaccacggaa

SEQ ID NO: 64212 - RNA, 22 nt, Synthetic Construct
  source 1..22: mol_type = other RNA
caagtcactagtggttccgttt

SEQ ID NO: 64213 - RNA, 22 nt, Synthetic Construct
  source 1..22: mol_type = other RNA
caagtcactagtggttccgttt

SEQ ID NO: 64214 - RNA, 24 nt, Synthetic Construct
  source 1..24: mol_type = other RNA
tattgcacttgtcccggcctgtaa

SEQ ID NO: 64215 - RNA, 24 nt, Synthetic Construct
  source 1..24: mol_type = other RNA
tattgcacttgtcccggcctgtaa

SEQ ID NO: 64216 - RNA, 18 nt, Synthetic Construct
  source 1..18: mol_type = other RNA
gtaggtcatcgtcaggct

SEQ ID NO: 64217 - RNA, 20 nt, Synthetic Construct
  source 1..20: mol_type = other RNA
gagtaggacgttgccaggtt

SEQ ID NO: 64218 - RNA, 27 nt, Synthetic Construct
  source 1..27: mol_type = other RNA
ttctcactactgcacttgactagtctt

SEQ ID NO: 64219 - RNA, 21 nt, Synthetic Construct
  source 1..21: mol_type = other RNA
tgaggcagtagattgtatagt

SEQ ID NO: 64220 - RNA, 32 nt, Synthetic Construct; identical to SEQ ID NO: 18425
  source 1..32: mol_type = other RNA

SEQ ID NO: 64221 - RNA, 21 nt, Synthetic Construct
  source 1..21: mol_type = other RNA
tgaggtggtagattgtatagt

SEQ ID NO: 64222 - RNA, 21 nt, Synthetic Construct
  source 1..21: mol_type = other RNA
tgaggtggtagattgtatagt

SEQ ID NO: 64223 - RNA, 22 nt, Synthetic Construct
  source 1..22: mol_type = other RNA
tggagtgtgacaatggtgcttg

SEQ ID NO: 64224 - RNA, 22 nt, Synthetic Construct
  source 1..22: mol_type = other RNA
tcccgtactgagctgccccgag

SEQ ID NO: 64225 - RNA, 22 nt, Synthetic Construct
  source 1..22: mol_type = other RNA
tcccgtactgagctgccccgag

SEQ ID NO: 64226 - RNA, 27 nt, Synthetic Construct
  source 1..27: mol_type = other RNA
ccccccactgctaaatttaactggctt

SEQ ID NO: 64227 - RNA, 27 nt, Synthetic Construct
  source 1..27: mol_type = other RNA
ccccccactgctaaatttaactggctt

SEQ ID NO: 64228 - RNA, 21 nt, Synthetic Construct
  source 1..21: mol_type = other RNA
ttcacagtggctaagttctgt

SEQ ID NO: 64229 - RNA, 23 nt, Synthetic Construct
  source 1..23: mol_type = other RNA
caaagtgctgttcgtgtaggtag

SEQ ID NO: 64230 - RNA, 23 nt, Synthetic Construct
  source 1..23: mol_type = other RNA
caaagtgctgttcgtgtaggtag

SEQ ID NO: 64231 - RNA, 25 nt, Synthetic Construct
  source 1..25: mol_type = other RNA
tgtaaacatccttgactggaagctt

SEQ ID NO: 64232 - RNA, 23 nt, Synthetic Construct
  source 1..23: mol_type = other RNA
tcctgtactgagctgcctcgaga

SEQ ID NO: 64233 - RNA, 23 nt, Synthetic Construct
  source 1..23: mol_type = other RNA
agaggggcagagagcgagacttt

SEQ ID NO: 64234 - RNA, 17 nt, Synthetic Construct
  source 1..17: mol_type = other RNA
tctacagtccgacgatc

SEQ ID NO: 64235 - RNA, 17 nt, Synthetic Construct
  source 1..17: mol_type = other RNA
tctacagtccgacgatc

SEQ ID NO: 64236 - RNA, 16 nt, Synthetic Construct
  source 1..16: mol_type = other RNA
gagtttggctggggcg

SEQ ID NO: 64237 - RNA, 22 nt, Synthetic Construct
  source 1..22: mol_type = other RNA
tagcagcacgtaaatactggcg

SEQ ID NO: 64238 - RNA, 22 nt, Synthetic Construct
  source 1..22: mol_type = other RNA
tgaggtagtaggttgtagagtt

SEQ ID NO: 64239 - RNA, 22 nt, Synthetic Construct
  source 1..22: mol_type = other RNA
tgaggtagtaggttgtagagtt

SEQ ID NO: 64240 - RNA, 22 nt, Synthetic Construct
  source 1..22: mol_type = other RNA
tgactccttaagcgaatctcgc

SEQ ID NO: 64241 - RNA, 22 nt, Synthetic Construct
  source 1..22: mol_type = other RNA
tgactccttaagcgaatctcgc

SEQ ID NO: 64242 - RNA, 21 nt, Synthetic Construct
  source 1..21: mol_type = other RNA
ttatggtttgcctgggactga

SEQ ID NO: 64243 - RNA, 21 nt, Synthetic Construct
  source 1..21: mol_type = other RNA
ttatggtttgcctgggactga

SEQ ID NO: 64244 - RNA, 22 nt, Synthetic Construct
  source 1..22: mol_type = other RNA
tgaggtagtagtttgtatagtt

SEQ ID NO: 64245 - RNA, 21 nt, Synthetic Construct
  source 1..21: mol_type = other RNA
tcctgtactgagttgccccga

SEQ ID NO: 64246 - RNA, 39 nt, Synthetic Construct; identical to SEQ ID NO: 34238
  source 1..39: mol_type = other RNA

SEQ ID NO: 64247 - RNA, 22 nt, Synthetic Construct
  source 1..22: mol_type = other RNA
tgaggtggtaggttgtatagtt

SEQ ID NO: 64248 - RNA, 22 nt, Synthetic Construct
  source 1..22: mol_type = other RNA
ggaggtagtaggttgtgtggtt

SEQ ID NO: 64249 - RNA, 22 nt, Synthetic Construct
  source 1..22: mol_type = other RNA
ggaggtagtaggttgtgtggtt

SEQ ID NO: 64250 - RNA, 22 nt, Synthetic Construct
  source 1..22: mol_type = other RNA
aggaatgtaaagaagtatgtat

SEQ ID NO: 64251 - RNA, 22 nt, Synthetic Construct
  source 1..22: mol_type = other RNA
aggaatgtaaagaagtatgtat

SEQ ID NO: 64252 - RNA, 22 nt, Synthetic Construct
  source 1..22: mol_type = other RNA
tggaatgtaaggaagtatgtat

SEQ ID NO: 64253 - RNA, 27 nt, Synthetic Construct
  source 1..27: mol_type = other RNA
ccccccactgctaaatttgactagctt

SEQ ID NO: 64254 - RNA, 22 nt, Synthetic Construct
  source 1..22: mol_type = other RNA
ttcgagtaatccaggataggct

SEQ ID NO: 64255 - RNA, 22 nt, Synthetic Construct
  source 1..22: mol_type = other RNA
ttcgagtaatccaggataggct

SEQ ID NO: 64256 - RNA, 16 nt, Synthetic Construct
  source 1..16: mol_type = other RNA
cccaaaggtcgtcggt

SEQ ID NO: 64257 - RNA, 16 nt, Synthetic Construct
  source 1..16: mol_type = other RNA
cccaaaggtcgtcggt

SEQ ID NO: 64258 - RNA, 22 nt, Synthetic Construct
  source 1..22: mol_type = other RNA
tgaggtagtagatagtatagtt

SEQ ID NO: 64259 - RNA, 22 nt, Synthetic Construct
  source 1..22: mol_type = other RNA
tgaggtagtagatagtatagtt

SEQ ID NO: 64260 - RNA, 22 nt, Synthetic Construct
  source 1..22: mol_type = other RNA
tcaggtagtagattgtatagtt

SEQ ID NO: 64261 - RNA, 23 nt, Synthetic Construct
  source 1..23: mol_type = other RNA
acagtagtctgcacattggttaa

SEQ ID NO: 64262 - RNA, 20 nt, Synthetic Construct
  source 1..20: mol_type = other RNA
tgaggtagtaggttgtgagg

SEQ ID NO: 64263 - RNA, 23 nt, Synthetic Construct
  source 1..23: mol_type = other RNA
gtcagtttgtcaaataccccatt

SEQ ID NO: 64264 - RNA, 23 nt, Synthetic Construct
  source 1..23: mol_type = other RNA
gtcagtttgtcaaataccccatt

SEQ ID NO: 64265 - RNA, 22 nt, Synthetic Construct
  source 1..22: mol_type = other RNA
taccctgtagaaccgaatttgt

SEQ ID NO: 64266 - RNA, 22 nt, Synthetic Construct
  source 1..22: mol_type = other RNA
taccctgtagaaccgaatttgt

SEQ ID NO: 64267 - RNA, 22 nt, Synthetic Construct
  source 1..22: mol_type = other RNA
caacggaatcccaaaagcagct

SEQ ID NO: 64268 - RNA, 23 nt, Synthetic Construct
  source 1..23: mol_type = other RNA
tcaggctcagtcccctcccgttt

SEQ ID NO: 64269 - RNA, 22 nt, Synthetic Construct
  source 1..22: mol_type = other RNA
tgaggtagtaggttgtatagat

SEQ ID NO: 64270 - RNA, 19 nt, Synthetic Construct
  source 1..19: mol_type = other RNA
ggggatgtagctcagatgg

SEQ ID NO: 64271 - RNA, 17 nt, Synthetic Construct
  source 1..17: mol_type = other RNA
tctacagtccgacgatc

SEQ ID NO: 64272 - RNA, 17 nt, Synthetic Construct
  source 1..17: mol_type = other RNA
tctacagtccgacgatc

SEQ ID NO: 64273 - RNA, 17 nt, Synthetic Construct
  source 1..17: mol_type = other RNA
cgactcttagcggtgga

SEQ ID NO: 64274 - RNA, 24 nt, Synthetic Construct
  source 1..24: mol_type = other RNA
tagcttatcagactgatgttgact

SEQ ID NO: 64275 - RNA, 24 nt, Synthetic Construct
  source 1..24: mol_type = other RNA
tagcttatcagactgatgttgact

SEQ ID NO: 64276 - RNA, 27 nt, Synthetic Construct
  source 1..27: mol_type = other RNA
ggggagctaatcccagaaacccggtcg

SEQ ID NO: 64277 - RNA, 27 nt, Synthetic Construct
  source 1..27: mol_type = other RNA
ggggagctaatcccagaaacccggtcg

SEQ ID NO: 64278 - RNA, 22 nt, Synthetic Construct
  source 1..22: mol_type = other RNA
tgaggtagtaggttgtgtggta

SEQ ID NO: 64279 - RNA, 23 nt, Synthetic Construct
  source 1..23: mol_type = other RNA
ctagcaccatctgaaatcggtta

SEQ ID NO: 64280 - RNA, 23 nt, Synthetic Construct
  source 1..23: mol_type = other RNA
ctagcaccatctgaaatcggtta

SEQ ID NO: 64281 - RNA, 21 nt, Synthetic Construct
  source 1..21: mol_type = other RNA
tgaggtagaaggttgtatagt

SEQ ID NO: 64282 - RNA, 21 nt, Synthetic Construct
  source 1..21: mol_type = other RNA
tgaggtagaaggttgtatagt

SEQ ID NO: 64283 - RNA, 18 nt, Synthetic Construct
  source 1..18: mol_type = other RNA
accaaggggtcgtgggtt

SEQ ID NO: 64284 - RNA, 18 nt, Synthetic Construct
  source 1..18: mol_type = other RNA
accaaggggtcgtgggtt

SEQ ID NO: 64285 - RNA, 17 nt, Synthetic Construct
  source 1..17: mol_type = other RNA
cgcgacctcagatcaga

SEQ ID NO: 64286 - RNA, 23 nt, Synthetic Construct
  source 1..23: mol_type = other RNA
tgaggtagtagtttgtgctgttg

SEQ ID NO: 64287 - RNA, 22 nt, Synthetic Construct
  source 1..22: mol_type = other RNA
ngaggtagtagattgtatagtt

SEQ ID NO: 64288 - RNA, 26 nt, Synthetic Construct
  source 1..26: mol_type = other RNA
ggtggctgtagctcagttggtagagt

SEQ ID NO: 64289 - RNA, 26 nt, Synthetic Construct
  source 1..26: mol_type = other RNA
ggtggctgtagctcagttggtagagt

SEQ ID NO: 64290 - RNA, 22 nt, Synthetic Construct
  source 1..22: mol_type = other RNA
tgaggtagtagtttgtgccgtt

SEQ ID NO: 64291 - RNA, 22 nt, Synthetic Construct
  source 1..22: mol_type = other RNA
tgaggtagtagcttgtgctgtt

SEQ ID NO: 64292 - RNA, 23 nt, Synthetic Construct
  source 1..23: mol_type = other RNA
tcctgtactgagctgctccgaga

SEQ ID NO: 64293 - RNA, 23 nt, Synthetic Construct
  source 1..23: mol_type = other RNA
tcctgtactgagctgctccgaga

SEQ ID NO: 64294 - RNA, 21 nt, Synthetic Construct
  source 1..21: mol_type = other RNA
tgaggtggtagattgtatagt

SEQ ID NO: 64295 - RNA, 24 nt, Synthetic Construct
  source 1..24: mol_type = other RNA
tgaggtagtaggttgtgtggtttc

SEQ ID NO: 64296 - RNA, 24 nt, Synthetic Construct
  source 1..24: mol_type = other RNA
tgaggtagtaggttgtgtggtttc

SEQ ID NO: 64297 - RNA, 19 nt, Synthetic Construct
  source 1..19: mol_type = other RNA
tggctcagttcagcaggaa

SEQ ID NO: 64298 - RNA, 19 nt, Synthetic Construct
  source 1..19: mol_type = other RNA
agtaggtcatcgtcaggct

SEQ ID NO: 64299 - RNA, 19 nt, Synthetic Construct
  source 1..19: mol_type = other RNA
agtaggtcatcgtcaggct

SEQ ID NO: 64300 - RNA, 20 nt, Synthetic Construct
  source 1..20: mol_type = other RNA
gtgccgaagctgtgggattg

SEQ ID NO: 64301 - RNA, 20 nt, Synthetic Construct
  source 1..20: mol_type = other RNA
gtgccgaagctgtgggattg

SEQ ID NO: 64302 - RNA, 29 nt, Synthetic Construct
  source 1..29: mol_type = other RNA
cgactcttagcggtggatcactcggctcg

SEQ ID NO: 64303 - RNA, 29 nt, Synthetic Construct
  source 1..29: mol_type = other RNA
cgactcttagcggtggatcactcggctcg

SEQ ID NO: 64304 - RNA, 22 nt, Synthetic Construct
  source 1..22: mol_type = other RNA
ttcaagtaatccaggatgggct

SEQ ID NO: 64305 - RNA, 22 nt, Synthetic Construct
  source 1..22: mol_type = other RNA
ttcaagtaatccaggatgggct

SEQ ID NO: 64306 - RNA, 23 nt, Synthetic Construct
  source 1..23: mol_type = other RNA
ctcggcgtggcgtcggtcgtggt

SEQ ID NO: 64307 - RNA, 43 nt, Synthetic Construct; identical to SEQ ID NO: 727
  source 1..43: mol_type = other RNA

SEQ ID NO: 64308 - RNA, 22 nt, Synthetic Construct
  source 1..22: mol_type = other RNA
tgaggtagtaggttgtataatt

SEQ ID NO: 64309 - RNA, 21 nt, Synthetic Construct
  source 1..21: mol_type = other RNA
gagttctacagtccgacgatc

SEQ ID NO: 64310 - RNA, 21 nt, Synthetic Construct
  source 1..21: mol_type = other RNA
gagttctacagtccgacgatc

SEQ ID NO: 64311 - RNA, 22 nt, Synthetic Construct
  source 1..22: mol_type = other RNA
tctgcccagtgctctgaatgtc

SEQ ID NO: 64312 - RNA, 22 nt, Synthetic Construct
  source 1..22: mol_type = other RNA
tctgcccagtgctctgaatgtc

SEQ ID NO: 64313 - RNA, 21 nt, Synthetic Construct
  source 1..21: mol_type = other RNA
cgaaccgtgagtaataatgcg

SEQ ID NO: 64314 - RNA, 21 nt, Synthetic Construct
  source 1..21: mol_type = other RNA
cgaaccgtgagtaataatgcg

SEQ ID NO: 64315 - RNA, 22 nt, Synthetic Construct
  source 1..22: mol_type = other RNA
atggatttttggagcagggaga

SEQ ID NO: 64316 - RNA, 23 nt, Synthetic Construct
  source 1..23: mol_type = other RNA
tcccgtactgagctgccccgagt

SEQ ID NO: 64317 - RNA, 20 nt, Synthetic Construct
  source 1..20: mol_type = other RNA
tgaggtagaaggttgtatag

SEQ ID NO: 64318 - RNA, 21 nt, Synthetic Construct
  source 1..21: mol_type = other RNA
ctagactggagctccttgagg

SEQ ID NO: 64319 - RNA, 16 nt, Synthetic Construct
  source 1..16: mol_type = other RNA
ccatgccgcgtgcggg

SEQ ID NO: 64320 - RNA, 22 nt, Synthetic Construct
  source 1..22: mol_type = other RNA
cagtggttttaccctatggtag

SEQ ID NO: 64321 - RNA, 22 nt, Synthetic Construct
  source 1..22: mol_type = other RNA
cagtggttttaccctatggtag

SEQ ID NO: 64322 - RNA, 22 nt, Synthetic Construct
  source 1..22: mol_type = other RNA
tgggatgtaaagaagtatgtat

SEQ ID NO: 64323 - RNA, 20 nt, Synthetic Construct
  source 1..20: mol_type = other RNA
tgaggtagtaggttgcatag

SEQ ID NO: 64324 - RNA, 20 nt, Synthetic Construct
  source 1..20: mol_type = other RNA
aattgcacggtatccatctg

SEQ ID NO: 64325 - RNA, 20 nt, Synthetic Construct
  source 1..20: mol_type = other RNA
aattgcacggtatccatctg

SEQ ID NO: 64326 - RNA, 23 nt, Synthetic Construct
  source 1..23: mol_type = other RNA
caaagtgctgttcgtgcagatag

SEQ ID NO: 64327 - RNA, 27 nt, Synthetic Construct
  source 1..27: mol_type = other RNA
cgactcttagcggtggatcactcggct

SEQ ID NO: 64328 - RNA, 36 nt, Synthetic Construct; identical to SEQ ID NO: 10982
  source 1..36: mol_type = other RNA

SEQ ID NO: 64329 - RNA, 19 nt, Synthetic Construct
  source 1..19: mol_type = other RNA
tacagtatagatgatgtac

SEQ ID NO: 64330 - RNA, 19 nt, Synthetic Construct
  source 1..19: mol_type = other RNA
tacagtatagatgatgtac

SEQ ID NO: 64331 - RNA, 23 nt, Synthetic Construct
  source 1..23: mol_type = other RNA
cagagttctacagtccgacgatc

SEQ ID NO: 64332 - RNA, 23 nt, Synthetic Construct
  source 1..23: mol_type = other RNA
cagagttctacagtccgacgatc

SEQ ID NO: 64333 - RNA, 22 nt, Synthetic Construct
  source 1..22: mol_type = other RNA
ctggctagggaaaatgattgga

SEQ ID NO: 64334 - RNA, 36 nt, Synthetic Construct; identical to SEQ ID NO: 10982
  source 1..36: mol_type = other RNA

SEQ ID NO: 64335 - RNA, 36 nt, Synthetic Construct; identical to SEQ ID NO: 10982
  source 1..36: mol_type = other RNA

SEQ ID NO: 64336 - RNA, 17 nt, Synthetic Construct
  source 1..17: mol_type = other RNA
gtgttcggaagattttc

SEQ ID NO: 64337 - RNA, 20 nt, Synthetic Construct
  source 1..20: mol_type = other RNA
cccataaagtagaaagcact

SEQ ID NO: 64338 - RNA, 18 nt, Synthetic Construct
  source 1..18: mol_type = other RNA
agggaacgtgagctgggt

SEQ ID NO: 64339 - RNA, 22 nt, Synthetic Construct
  source 1..22: mol_type = other RNA
aagacgggaggaaagaagggag

SEQ ID NO: 64340 - RNA, 22 nt, Synthetic Construct
  source 1..22: mol_type = other RNA
aagacgggaggaaagaagggag

SEQ ID NO: 64341 - RNA, 31 nt, Synthetic Construct; identical to SEQ ID NO: 9212
  source 1..31: mol_type = other RNA

SEQ ID NO: 64342 - RNA, 23 nt, Synthetic Construct
  source 1..23: mol_type = other RNA
caacggaatcccaaaagcagcta

SEQ ID NO: 64343 - RNA, 24 nt, Synthetic Construct
  source 1..24: mol_type = other RNA
aaaccgttaccattactgagttta

SEQ ID NO: 64344 - RNA, 25 nt, Synthetic Construct
  source 1..25: mol_type = other RNA
tgagaactgaattccataggctgtt

SEQ ID NO: 64345 - RNA, 25 nt, Synthetic Construct
  source 1..25: mol_type = other RNA
tgagaactgaattccataggctgtt

SEQ ID NO: 64346 - RNA, 22 nt, Synthetic Construct
  source 1..22: mol_type = other RNA
cagcagcacgtaaatattggcg

SEQ ID NO: 64347 - RNA, 22 nt, Synthetic Construct
  source 1..22: mol_type = other RNA
tgtcagtttgtcaaatacccca

SEQ ID NO: 64348 - RNA, 22 nt, Synthetic Construct
  source 1..22: mol_type = other RNA
tgtcagtttgtcaaatacccca

SEQ ID NO: 64349 - RNA, 24 nt, Synthetic Construct
  source 1..24: mol_type = other RNA
tgaggggcagagagcgagacttta

SEQ ID NO: 64350 - RNA, 22 nt, Synthetic Construct
  source 1..22: mol_type = other RNA
tcctgtactgagctgccccgac

SEQ ID NO: 64351 - RNA, 22 nt, Synthetic Construct
  source 1..22: mol_type = other RNA
tcctgtactgagctgccccgac

SEQ ID NO: 64352 - RNA, 16 nt, Synthetic Construct
  source 1..16: mol_type = other RNA
gtccggatcgtagtct

SEQ ID NO: 64353 - RNA, 21 nt, Synthetic Construct
  source 1..21: mol_type = other RNA
tgaggtagcaggttgtgtggt

SEQ ID NO: 64354 - RNA, 23 nt, Synthetic Construct
  source 1..23: mol_type = other RNA
tggtaatacgacgtacttagtgt

SEQ ID NO: 64355 - RNA, 23 nt, Synthetic Construct
  source 1..23: mol_type = other RNA
tggtaatacgacgtacttagtgt

SEQ ID NO: 64356 - RNA, 15 nt, Synthetic Construct
  source 1..15: mol_type = other RNA
acaagtcgaacggta

SEQ ID NO: 64357 - RNA, 15 nt, Synthetic Construct
  source 1..15: mol_type = other RNA
acaagtcgaacggta

SEQ ID NO: 64358 - RNA, 24 nt, Synthetic Construct
  source 1..24: mol_type = other RNA
tcactgatcgagtcgtcctgcgcg

SEQ ID NO: 64359 - RNA, 24 nt, Synthetic Construct
  source 1..24: mol_type = other RNA
tcactgatcgagtcgtcctgcgcg

SEQ ID NO: 64360 - RNA, 22 nt, Synthetic Construct
  source 1..22: mol_type = other RNA
tcgaggagctcacagtctagta

SEQ ID NO: 64361 - RNA, 22 nt, Synthetic Construct
  source 1..22: mol_type = other RNA
gtaaacggcgggagtaactatg

SEQ ID NO: 64362 - RNA, 23 nt, Synthetic Construct
  source 1..23: mol_type = other RNA
gactatagaactttccccctcat

SEQ ID NO: 64363 - RNA, 23 nt, Synthetic Construct
  source 1..23: mol_type = other RNA
gactatagaactttccccctcat

SEQ ID NO: 64364 - RNA, 22 nt, Synthetic Construct
  source 1..22: mol_type = other RNA
tcgaaccgtgagtaataatgcg

SEQ ID NO: 64365 - RNA, 22 nt, Synthetic Construct
  source 1..22: mol_type = other RNA
tcgaaccgtgagtaataatgcg

SEQ ID NO: 64366 - RNA, 17 nt, Synthetic Construct
  source 1..17: mol_type = other RNA
cgatctgtagctggtct

SEQ ID NO: 64367 - RNA, 22 nt, Synthetic Construct
  source 1..22: mol_type = other RNA
tgtgactggttgaccagagggg

SEQ ID NO: 64368 - RNA, 22 nt, Synthetic Construct
  source 1..22: mol_type = other RNA
tgaggtagtagttagtgctgtt

SEQ ID NO: 64369 - RNA, 22 nt, Synthetic Construct
  source 1..22: mol_type = other RNA
tgaggtagtagttagtgctgtt

SEQ ID NO: 64370 - RNA, 17 nt, Synthetic Construct
  source 1..17: mol_type = other RNA
tcccagaaacccggtcg

SEQ ID NO: 64371 - RNA, 23 nt, Synthetic Construct
  source 1..23: mol_type = other RNA
aacggaatcccaaaagcagctgt

SEQ ID NO: 64372 - RNA, 22 nt, Synthetic Construct
  source 1..22: mol_type = other RNA
tagcggcacgtaaatattggcg

SEQ ID NO: 64373 - RNA, 22 nt, Synthetic Construct
  source 1..22: mol_type = other RNA
tagcggcacgtaaatattggcg

SEQ ID NO: 64374 - RNA, 22 nt, Synthetic Construct
  source 1..22: mol_type = other RNA
cccataaagtagaaagcactac

SEQ ID NO: 64375 - RNA, 17 nt, Synthetic Construct
  source 1..17: mol_type = other RNA
agaccctgttgagcttg

SEQ ID NO: 64376 - RNA, 16 nt, Synthetic Construct
  source 1..16: mol_type = other RNA
gatttgggagtgctcg

SEQ ID NO: 64377 - RNA, 21 nt, Synthetic Construct
  source 1..21: mol_type = other RNA
tgaggtagtaggttgtgcggt

SEQ ID NO: 64378 - RNA, 23 nt, Synthetic Construct
  source 1..23: mol_type = other RNA
tcaagagcaataacgaaaaatgt

SEQ ID NO: 64379 - RNA, 23 nt, Synthetic Construct
  source 1..23: mol_type = other RNA
tcaagagcaataacgaaaaatgt

SEQ ID NO: 64380 - RNA, 27 nt, Synthetic Construct
  source 1..27: mol_type = other RNA
cccctcactgctaaatttgactggctt

SEQ ID NO: 64381 - RNA, 27 nt, Synthetic Construct
  source 1..27: mol_type = other RNA
cccctcactgctaaatttgactggctt

SEQ ID NO: 64382 - RNA, 22 nt, Synthetic Construct
  source 1..22: mol_type = other RNA
ttcaagtaatccaggataggcc

SEQ ID NO: 64383 - RNA, 22 nt, Synthetic Construct
  source 1..22: mol_type = other RNA
ttcaagtaatccaggataggcc

SEQ ID NO: 64384 - RNA, 24 nt, Synthetic Construct
  source 1..24: mol_type = other RNA
caaagtgctgttcgtgcaggtaga

SEQ ID NO: 64385 - RNA, 22 nt, Synthetic Construct
  source 1..22: mol_type = other RNA
tgaggtagtaggttgtgttgtt

SEQ ID NO: 64386 - RNA, 22 nt, Synthetic Construct
  source 1..22: mol_type = other RNA
tgaggtagtaggttgtgttgtt

SEQ ID NO: 64387 - RNA, 20 nt, Synthetic Construct
  source 1..20: mol_type = other RNA
tagcgaaattccttgtcggg

SEQ ID NO: 64388 - RNA, 24 nt, Synthetic Construct
  source 1..24: mol_type = other RNA
tcagcccgtgttcggaagattttc

SEQ ID NO: 64389 - RNA, 27 nt, Synthetic Construct
  source 1..27: mol_type = other RNA
ccccccattgctaaatttgactggctt

SEQ ID NO: 64390 - RNA, 24 nt, Synthetic Construct
  source 1..24: mol_type = other RNA
tgtaaacatccccgactgggagct

SEQ ID NO: 64391 - RNA, 24 nt, Synthetic Construct
  source 1..24: mol_type = other RNA
tgtaaacatccccgactgggagct

SEQ ID NO: 64392 - RNA, 21 nt, Synthetic Construct
  source 1..21: mol_type = other RNA
cgtaccgtgagtaataatgtg

SEQ ID NO: 64393 - RNA, 21 nt, Synthetic Construct
  source 1..21: mol_type = other RNA
cgtaccgtgagtaataatgtg

SEQ ID NO: 64394 - RNA, 16 nt, Synthetic Construct
  source 1..16: mol_type = other RNA
cgtgagctgggtttag

SEQ ID NO: 64395 - RNA, 16 nt, Synthetic Construct
  source 1..16: mol_type = other RNA
cgtgagctgggtttag

SEQ ID NO: 64396 - RNA, 30 nt, Synthetic Construct; identical to SEQ ID NO: 6405
  source 1..30: mol_type = other RNA

SEQ ID NO: 64397 - RNA, 30 nt, Synthetic Construct; identical to SEQ ID NO: 6405
  source 1..30: mol_type = other RNA

SEQ ID NO: 64398 - RNA, 23 nt, Synthetic Construct
  source 1..23: mol_type = other RNA
ctagactgaagctccttgaggtt

SEQ ID NO: 64399 - RNA, 43 nt, Synthetic Construct; identical to SEQ ID NO: 727
  source 1..43: mol_type = other RNA

SEQ ID NO: 64400 - RNA, 16 nt, Synthetic Construct
  source 1..16: mol_type = other RNA
gaaattccttgtcggg

SEQ ID NO: 64401 - RNA, 21 nt, Synthetic Construct
  source 1..21: mol_type = other RNA
acagtagcctgcacattggtt

SEQ ID NO: 64402 - RNA, 21 nt, Synthetic Construct
  source 1..21: mol_type = other RNA
acagtagcctgcacattggtt

SEQ ID NO: 64403 - RNA, 21 nt, Synthetic Construct
  source 1..21: mol_type = other RNA
tccagtactgagctgccccga

SEQ ID NO: 64404 - RNA, 24 nt, Synthetic Construct
  source 1..24: mol_type = other RNA
atgacacgatcactcccgttgagt

SEQ ID NO: 64405 - RNA, 15 nt, Synthetic Construct
  source 1..15: mol_type = other RNA
gccgttcttagttgg

SEQ ID NO: 64406 - RNA, 15 nt, Synthetic Construct
  source 1..15: mol_type = other RNA
gccgttcttagttgg

SEQ ID NO: 64407 - RNA, 21 nt, Synthetic Construct
  source 1..21: mol_type = other RNA
gagttctacagtccgacgatc

SEQ ID NO: 64408 - RNA, 21 nt, Synthetic Construct
  source 1..21: mol_type = other RNA
gagttctacagtccgacgatc

SEQ ID NO: 64409 - RNA, 21 nt, Synthetic Construct
  source 1..21: mol_type = other RNA
cataattacttttggtacgcg

SEQ ID NO: 64410 - RNA, 21 nt, Synthetic Construct
  source 1..21: mol_type = other RNA
cataattacttttggtacgcg

SEQ ID NO: 64411 - RNA, 23 nt, Synthetic Construct
  source 1..23: mol_type = other RNA
tccagtactgagctgccccgaga

SEQ ID NO: 64412 - RNA, 24 nt, Synthetic Construct
  source 1..24: mol_type = other RNA
tgtcagtttgtcaaataccccagt

SEQ ID NO: 64413 - RNA, 22 nt, Synthetic Construct
  source 1..22: mol_type = other RNA
tcgtaccatgagtaataatgcg

SEQ ID NO: 64414 - RNA, 22 nt, Synthetic Construct
  source 1..22: mol_type = other RNA
tcgtaccatgagtaataatgcg

SEQ ID NO: 64415 - RNA, 22 nt, Synthetic Construct
  source 1..22: mol_type = other RNA
tggcagcacgtaaatattggcg

SEQ ID NO: 64416 - RNA, 22 nt, Synthetic Construct
  source 1..22: mol_type = other RNA
tgaggttgtagtttgtgctgtt

SEQ ID NO: 64417 - RNA, 17 nt, Synthetic Construct
  source 1..17: mol_type = other RNA
ggagtatggtcgcaagg

SEQ ID NO: 64418 - RNA, 22 nt, Synthetic Construct
  source 1..22: mol_type = other RNA
taaggtagtaggttgtgtggtt

SEQ ID NO: 64419 - RNA, 25 nt, Synthetic Construct
  source 1..25: mol_type = other RNA
ggtaaaattgctgagtgaagcattg

SEQ ID NO: 64420 - RNA, 25 nt, Synthetic Construct
  source 1..25: mol_type = other RNA
ggtaaaattgctgagtgaagcattg

SEQ ID NO: 64421 - RNA, 25 nt, Synthetic Construct
  source 1..25: mol_type = other RNA
ttgaggatatgagatcgggacgaca

SEQ ID NO: 64422 - RNA, 25 nt, Synthetic Construct
  source 1..25: mol_type = other RNA
ttgaggatatgagatcgggacgaca

SEQ ID NO: 64423 - RNA, 23 nt, Synthetic Construct
  source 1..23: mol_type = other RNA
tgaggtagtagtttgtgctgtta

SEQ ID NO: 64424 - RNA, 23 nt, Synthetic Construct
  source 1..23: mol_type = other RNA
tgaggtagtagtttgtgctgtta

SEQ ID NO: 64425 - RNA, 23 nt, Synthetic Construct
  source 1..23: mol_type = other RNA
gtccagttttcccaggaatccct

SEQ ID NO: 64426 - RNA, 23 nt, Synthetic Construct
  source 1..23: mol_type = other RNA
gtccagttttcccaggaatccct

SEQ ID NO: 64427 - RNA, 22 nt, Synthetic Construct
  source 1..22: mol_type = other RNA
tcgaaaccatcctctgctacca

SEQ ID NO: 64428 - RNA, 36 nt, Synthetic Construct; identical to SEQ ID NO: 10333
  source 1..36: mol_type = other RNA

SEQ ID NO: 64429 - RNA, 22 nt, Synthetic Construct
  source 1..22: mol_type = other RNA
taaggtagtaggttgtgtggtt

SEQ ID NO: 64430 - RNA, 34 nt, Synthetic Construct; identical to SEQ ID NO: 39844
  source 1..34: mol_type = other RNA

SEQ ID NO: 64431 - RNA, 34 nt, Synthetic Construct; identical to SEQ ID NO: 39844
  source 1..34: mol_type = other RNA

SEQ ID NO: 64432 - RNA, 22 nt, Synthetic Construct
  source 1..22: mol_type = other RNA
tgaggtagtaggttgtatagct

SEQ ID NO: 64433 - RNA, 22 nt, Synthetic Construct
  source 1..22: mol_type = other RNA
tgaggtagtaggttgtatagct

SEQ ID NO: 64434 - RNA, 22 nt, Synthetic Construct
  source 1..22: mol_type = other RNA
cgaggtagtagtttgtgctgtt

SEQ ID NO: 64435 - RNA, 16 nt, Synthetic Construct
  source 1..16: mol_type = other RNA
cacaccgcccgtcgct

SEQ ID NO: 64436 - RNA, 16 nt, Synthetic Construct
  source 1..16: mol_type = other RNA
cacaccgcccgtcgct

SEQ ID NO: 64437 - RNA, 21 nt, Synthetic Construct
  source 1..21: mol_type = other RNA
agcaggacggtggccatggaa

SEQ ID NO: 64438 - RNA, 21 nt, Synthetic Construct
  source 1..21: mol_type = other RNA
agcaggacggtggccatggaa

SEQ ID NO: 64439 - RNA, 22 nt, Synthetic Construct
  source 1..22: mol_type = other RNA
taactccttaagcgaatatcgc

SEQ ID NO: 64440 - RNA, 22 nt, Synthetic Construct
  source 1..22: mol_type = other RNA
taactccttaagcgaatatcgc

SEQ ID NO: 64441 - RNA, 16 nt, Synthetic Construct
  source 1..16: mol_type = other RNA
gtccacggccatacca

SEQ ID NO: 64442 - RNA, 22 nt, Synthetic Construct
  source 1..22: mol_type = other RNA
tagcggcacgtaaatattggcg

SEQ ID NO: 64443 - RNA, 21 nt, Synthetic Construct
  source 1..21: mol_type = other RNA
tggagtgtgacaatggtgttt

SEQ ID NO: 64444 - RNA, 21 nt, Synthetic Construct
  source 1..21: mol_type = other RNA
tggagtgtgacaatggtgttt

SEQ ID NO: 64445 - RNA, 21 nt, Synthetic Construct
  source 1..21: mol_type = other RNA
tgaggtagtagattgcatagt

SEQ ID NO: 64446 - RNA, 23 nt, Synthetic Construct
  source 1..23: mol_type = other RNA
tggtaatacgacgtacttggtgt

SEQ ID NO: 64447 - RNA, 21 nt, Synthetic Construct
  source 1..21: mol_type = other RNA
taaggtagtaggttgtgtggt

SEQ ID NO: 64448 - RNA, 31 nt, Synthetic Construct; identical to SEQ ID NO: 285
  source 1..31: mol_type = other RNA

SEQ ID NO: 64449 - RNA, 22 nt, Synthetic Construct
  source 1..22: mol_type = other RNA
tagcaacacgtaaatattggcg

SEQ ID NO: 64450 - RNA, 22 nt, Synthetic Construct
  source 1..22: mol_type = other RNA
tagcaacacgtaaatattggcg

SEQ ID NO: 64451 - RNA, 16 nt, Synthetic Construct
  source 1..16: mol_type = other RNA
gtctacgaccatacca

SEQ ID NO: 64452 - RNA, 16 nt, Synthetic Construct
  source 1..16: mol_type = other RNA
gtctacgaccatacca

SEQ ID NO: 64453 - RNA, 23 nt, Synthetic Construct
  source 1..23: mol_type = other RNA
caaagtgttgttcgtgcaggtag

SEQ ID NO: 64454 - RNA, 23 nt, Synthetic Construct
  source 1..23: mol_type = other RNA
caaagtgttgttcgtgcaggtag

SEQ ID NO: 64455 - RNA, 19 nt, Synthetic Construct
  source 1..19: mol_type = other RNA
atccctgcggcgtctccat

SEQ ID NO: 64456 - RNA, 20 nt, Synthetic Construct
  source 1..20: mol_type = other RNA
gaatcgctagtaatcgcgga

SEQ ID NO: 64457 - RNA, 27 nt, Synthetic Construct
  source 1..27: mol_type = other RNA
ccccccactgctaaatttgaccggctt

SEQ ID NO: 64458 - RNA, 25 nt, Synthetic Construct
  source 1..25: mol_type = other RNA
ctgaggatatgagatcgagacgaca

SEQ ID NO: 64459 - RNA, 25 nt, Synthetic Construct
  source 1..25: mol_type = other RNA
ctgaggatatgagatcgagacgaca

SEQ ID NO: 64460 - RNA, 22 nt, Synthetic Construct
  source 1..22: mol_type = other RNA
tggaatgcaaagaagtatgtat

SEQ ID NO: 64461 - RNA, 28 nt, Synthetic Construct
  source 1..28: mol_type = other RNA
ccccccactgctaaatttgactggcctt

SEQ ID NO: 64462 - RNA, 28 nt, Synthetic Construct
  source 1..28: mol_type = other RNA
ccccccactgctaaatttgactggcctt

SEQ ID NO: 64463 - RNA, 21 nt, Synthetic Construct
  source 1..21: mol_type = other RNA
taactccttaagcgatctcgc

SEQ ID NO: 64464 - RNA, 21 nt, Synthetic Construct
  source 1..21: mol_type = other RNA
taactccttaagcgatctcgc

SEQ ID NO: 64465 - RNA, 21 nt, Synthetic Construct
  source 1..21: mol_type = other RNA
tggagtgtgacaatggtgtct

SEQ ID NO: 64466 - RNA, 22 nt, Synthetic Construct
  source 1..22: mol_type = other RNA
tggagtgtgacaatggtgttaa

SEQ ID NO: 64467 - RNA, 15 nt, Synthetic Construct
  source 1..15: mol_type = other RNA
tgcctcagcgtcggt

SEQ ID NO: 64468 - RNA, 15 nt, Synthetic Construct
  source 1..15: mol_type = other RNA
tgcctcagcgtcggt

SEQ ID NO: 64469 - RNA, 17 nt, Synthetic Construct
  source 1..17: mol_type = other RNA
tctgcctcagcgtcggt

SEQ ID NO: 64470 - RNA, 17 nt, Synthetic Construct
  source 1..17: mol_type = other RNA
tctgcctcagcgtcggt

SEQ ID NO: 64471 - RNA, 21 nt, Synthetic Construct
  source 1..21: mol_type = other RNA
tcttggagtaggtcattgggt

SEQ ID NO: 64472 - RNA, 21 nt, Synthetic Construct
  source 1..21: mol_type = other RNA
tcttggagtaggtcattgggt

SEQ ID NO: 64473 - RNA, 22 nt, Synthetic Construct
  source 1..22: mol_type = other RNA
tgtcagtttgtcaaatacccaa

SEQ ID NO: 64474 - RNA, 21 nt, Synthetic Construct
  source 1..21: mol_type = other RNA
cataattacttttggtacgcg

SEQ ID NO: 64475 - RNA, 21 nt, Synthetic Construct
  source 1..21: mol_type = other RNA
cataattacttttggtacgcg

SEQ ID NO: 64476 - RNA, 22 nt, Synthetic Construct
  source 1..22: mol_type = other RNA
tgaggtagtagattgtgtggtt

SEQ ID NO: 64477 - RNA, 18 nt, Synthetic Construct
  source 1..18: mol_type = other RNA
cgactcttagcggtggat

SEQ ID NO: 64478 - RNA, 23 nt, Synthetic Construct
  source 1..23: mol_type = other RNA
tgtaaacatccttgactggaagc

SEQ ID NO: 64479 - RNA, 21 nt, Synthetic Construct
  source 1..21: mol_type = other RNA
tggagagtgacaatggtgttt

SEQ ID NO: 64480 - RNA, 21 nt, Synthetic Construct
  source 1..21: mol_type = other RNA
tggagagtgacaatggtgttt

SEQ ID NO: 64481 - RNA, 23 nt, Synthetic Construct
  source 1..23: mol_type = other RNA
cctcgcgcgattggagcggccga

SEQ ID NO: 64482 - RNA, 24 nt, Synthetic Construct
  source 1..24: mol_type = other RNA
tcccacatggtctagcggttagga

SEQ ID NO: 64483 - RNA, 24 nt, Synthetic Construct
  source 1..24: mol_type = other RNA
tcccacatggtctagcggttagga

SEQ ID NO: 64484 - RNA, 20 nt, Synthetic Construct
  source 1..20: mol_type = other RNA
tatgtctgctgaccatcacc

SEQ ID NO: 64485 - RNA, 16 nt, Synthetic Construct
  source 1..16: mol_type = other RNA
cgctagtaatcgcgga

SEQ ID NO: 64486 - RNA, 24 nt, Synthetic Construct
  source 1..24: mol_type = other RNA
agcaacattgtctgctgggtttct

SEQ ID NO: 64487 - RNA, 24 nt, Synthetic Construct
  source 1..24: mol_type = other RNA
agcaacattgtctgctgggtttct

SEQ ID NO: 64488 - RNA, 27 nt, Synthetic Construct
  source 1..27: mol_type = other RNA
ccccccactgctaaatttaactggctt

SEQ ID NO: 64489 - RNA, 25 nt, Synthetic Construct
  source 1..25: mol_type = other RNA
ccccccactgctaaatttgactggc

SEQ ID NO: 64490 - RNA, 25 nt, Synthetic Construct
  source 1..25: mol_type = other RNA
ccccccactgctaaatttgactggc

SEQ ID NO: 64491 - RNA, 28 nt, Synthetic Construct
  source 1..28: mol_type = other RNA
cccccccactgctaaatttgactggctt

SEQ ID NO: 64492 - RNA, 22 nt, Synthetic Construct
  source 1..22: mol_type = other RNA
tctttggttatctagctgtatg

SEQ ID NO: 64493 - RNA, 27 nt, Synthetic Construct
  source 1..27: mol_type = other RNA
ccccccactgctaaatttgactggcct

SEQ ID NO: 64494 - RNA, 17 nt, Synthetic Construct
  source 1..17: mol_type = other RNA
atagggaacgtgagctg

SEQ ID NO: 64495 - RNA, 17 nt, Synthetic Construct
  source 1..17: mol_type = other RNA
atagggaacgtgagctg

SEQ ID NO: 64496 - RNA, 22 nt, Synthetic Construct
  source 1..22: mol_type = other RNA
tgaagtagtaggttgtatagtt

SEQ ID NO: 64497 - RNA, 22 nt, Synthetic Construct
  source 1..22: mol_type = other RNA
tgaagtagtaggttgtatagtt

SEQ ID NO: 64498 - RNA, 23 nt, Synthetic Construct
  source 1..23: mol_type = other RNA
cgaatgttgctcggtgaacccct

SEQ ID NO: 64499 - RNA, 18 nt, Synthetic Construct
  source 1..18: mol_type = other RNA
ggtagcgtggccgagcgg

SEQ ID NO: 64500 - RNA, 20 nt, Synthetic Construct
  source 1..20: mol_type = other RNA
aatgcacccgggcaaggatt

SEQ ID NO: 64501 - RNA, 20 nt, Synthetic Construct
  source 1..20: mol_type = other RNA
aatgcacccgggcaaggatt

SEQ ID NO: 64502 - RNA, 22 nt, Synthetic Construct
  source 1..22: mol_type = other RNA
tattgcacttgtcccgacctgt

SEQ ID NO: 64503 - RNA, 22 nt, Synthetic Construct
  source 1..22: mol_type = other RNA
tattgcacttgtcccgacctgt

SEQ ID NO: 64504 - RNA, 22 nt, Synthetic Construct
  source 1..22: mol_type = other RNA
tattgcacttgtcccggcctat

SEQ ID NO: 64505 - RNA, 35 nt, Synthetic Construct; identical to SEQ ID NO: 787
  source 1..35: mol_type = other RNA

SEQ ID NO: 64506 - RNA, 35 nt, Synthetic Construct; identical to SEQ ID NO: 787
  source 1..35: mol_type = other RNA

SEQ ID NO: 64507 - RNA, 23 nt, Synthetic Construct
  source 1..23: mol_type = other RNA
caacggaatcccaaaggcagctg

SEQ ID NO: 64508 - RNA, 23 nt, Synthetic Construct
  source 1..23: mol_type = other RNA
caacggaatcccaaaggcagctg

SEQ ID NO: 64509 - RNA, 22 nt, Synthetic Construct
  source 1..22: mol_type = other RNA
tacagtactgtgataactgaag

SEQ ID NO: 64510 - RNA, 22 nt, Synthetic Construct
  source 1..22: mol_type = other RNA
tacagtactgtgataactgaag

SEQ ID NO: 64511 - RNA, 22 nt, Synthetic Construct
  source 1..22: mol_type = other RNA
tagcagcacgtaaatattagcg

SEQ ID NO: 64512 - RNA, 22 nt, Synthetic Construct
  source 1..22: mol_type = other RNA
tagcagcacgtaaatattagcg

SEQ ID NO: 64513 - RNA, 23 nt, Synthetic Construct
  source 1..23: mol_type = other RNA
tggtaatacgacgtacttagtat

SEQ ID NO: 64514 - RNA, 34 nt, Synthetic Construct; identical to SEQ ID NO: 495
  source 1..34: mol_type = other RNA

SEQ ID NO: 64515 - RNA, 34 nt, Synthetic Construct; identical to SEQ ID NO: 495
  source 1..34: mol_type = other RNA

SEQ ID NO: 64516 - RNA, 32 nt, Synthetic Construct; identical to SEQ ID NO: 4279
  source 1..32: mol_type = other RNA

SEQ ID NO: 64517 - RNA, 23 nt, Synthetic Construct
  source 1..23: mol_type = other RNA
caacggaatcccaaaagcagcta

SEQ ID NO: 64518 - RNA, 22 nt, Synthetic Construct
  source 1..22: mol_type = other RNA
tgaggaagtaggttgtgtggtt

SEQ ID NO: 64519 - RNA, 24 nt, Synthetic Construct
  source 1..24: mol_type = other RNA
ttccccttggggttgtaggaccac

SEQ ID NO: 64520 - RNA, 21 nt, Synthetic Construct
  source 1..21: mol_type = other RNA
tggggtagtaggttgtgtggt

SEQ ID NO: 64521 - RNA, 22 nt, Synthetic Construct
  source 1..22: mol_type = other RNA
ccctgtactgagctgccccgag

SEQ ID NO: 64522 - RNA, 22 nt, Synthetic Construct
  source 1..22: mol_type = other RNA
ccctgtactgagctgccccgag

SEQ ID NO: 64523 - RNA, 30 nt, Synthetic Construct; identical to SEQ ID NO: 36424
  source 1..30: mol_type = other RNA

SEQ ID NO: 64524 - RNA, 19 nt, Synthetic Construct
  source 1..19: mol_type = other RNA
tccccggcatctccaccat

SEQ ID NO: 64525 - RNA, 19 nt, Synthetic Construct
  source 1..19: mol_type = other RNA
tccccggcatctccaccat

SEQ ID NO: 64526 - RNA, 18 nt, Synthetic Construct
  source 1..18: mol_type = other RNA
catgcaagtcgaacggta

SEQ ID NO: 64527 - RNA, 23 nt, Synthetic Construct
  source 1..23: mol_type = other RNA
tgaggtagtaggttgtgtggttg

SEQ ID NO: 64528 - RNA, 23 nt, Synthetic Construct
  source 1..23: mol_type = other RNA
tgaggtagtaggttgtgtggttg

SEQ ID NO: 64529 - RNA, 22 nt, Synthetic Construct
  source 1..22: mol_type = other RNA
tgagaactgagttccatgggtt

SEQ ID NO: 64530 - RNA, 33 nt, Synthetic Construct; identical to SEQ ID NO: 7224
  source 1..33: mol_type = other RNA

SEQ ID NO: 64531 - RNA, 33 nt, Synthetic Construct; identical to SEQ ID NO: 7224
  source 1..33: mol_type = other RNA

SEQ ID NO: 64532 - RNA, 22 nt, Synthetic Construct
  source 1..22: mol_type = other RNA
ggcagggttcgtgactggggtg

SEQ ID NO: 64533 - RNA, 22 nt, Synthetic Construct
  source 1..22: mol_type = other RNA
cattgcacttgtctcggcctga

SEQ ID NO: 64534 - RNA, 22 nt, Synthetic Construct
  source 1..22: mol_type = other RNA
cattgcacttgtctcggcctga

SEQ ID NO: 64535 - RNA, 21 nt, Synthetic Construct
  source 1..21: mol_type = other RNA
tttgttcgttcggctcgcgtg

SEQ ID NO: 64536 - RNA, 22 nt, Synthetic Construct
  source 1..22: mol_type = other RNA
cattgcactcgtctcggtctga

SEQ ID NO: 64537 - RNA, 22 nt, Synthetic Construct
  source 1..22: mol_type = other RNA
cattgcactcgtctcggtctga

SEQ ID NO: 64538 - RNA, 23 nt, Synthetic Construct
  source 1..23: mol_type = other RNA
ggctcggtctgaggcccctcagt

SEQ ID NO: 64539 - RNA, 21 nt, Synthetic Construct
  source 1..21: mol_type = other RNA
ttaacttgaccgctctgacca

SEQ ID NO: 64540 - RNA, 28 nt, Synthetic Construct
  source 1..28: mol_type = other RNA
cccccccactgctaaatttgactggcta

SEQ ID NO: 64541 - RNA, 23 nt, Synthetic Construct
  source 1..23: mol_type = other RNA
tctttggttatctagctgtatgt

SEQ ID NO: 64542 - RNA, 23 nt, Synthetic Construct
  source 1..23: mol_type = other RNA
agggctgggtcggtcgggctggg

SEQ ID NO: 64543 - RNA, 21 nt, Synthetic Construct
  source 1..21: mol_type = other RNA
tcctgtactgagccgccccga

SEQ ID NO: 64544 - RNA, 39 nt, Synthetic Construct; identical to SEQ ID NO: 4400
  source 1..39: mol_type = other RNA

SEQ ID NO: 64545 - RNA, 27 nt, Synthetic Construct
  source 1..27: mol_type = other RNA
cgcgggtaaacggcgggagtaactatg

SEQ ID NO: 64546 - RNA, 21 nt, Synthetic Construct
  source 1..21: mol_type = other RNA
tgaggtagtagattgtgtggt

SEQ ID NO: 64547 - RNA, 16 nt, Synthetic Construct
  source 1..16: mol_type = other RNA
gcctacggccatacca

SEQ ID NO: 64548 - RNA, 16 nt, Synthetic Construct
  source 1..16: mol_type = other RNA
tcgtgacgatagtgca

SEQ ID NO: 64549 - RNA, 23 nt, Synthetic Construct
  source 1..23: mol_type = other RNA
aagcagcacgtaaatattggcgt

SEQ ID NO: 64550 - RNA, 23 nt, Synthetic Construct
  source 1..23: mol_type = other RNA
tggagagaaaggcagttcctgaa

SEQ ID NO: 64551 - RNA, 22 nt, Synthetic Construct
  source 1..22: mol_type = other RNA
tgaggtagtaggttgtaaagtt

SEQ ID NO: 64552 - RNA, 23 nt, Synthetic Construct
  source 1..23: mol_type = other RNA
ttcaagtaattcaggataggttg

SEQ ID NO: 64553 - RNA, 23 nt, Synthetic Construct
  source 1..23: mol_type = other RNA
ttcaagtaattcaggataggttg

SEQ ID NO: 64554 - RNA, 22 nt, Synthetic Construct
  source 1..22: mol_type = other RNA
tgaggcagtagattgtatagtt

SEQ ID NO: 64555 - RNA, 20 nt, Synthetic Construct
  source 1..20: mol_type = other RNA
tcaggctcagtcccctcccg

SEQ ID NO: 64556 - RNA, 22 nt, Synthetic Construct
  source 1..22: mol_type = other RNA
actccagccccacagcctcagc

SEQ ID NO: 64557 - RNA, 22 nt, Synthetic Construct
  source 1..22: mol_type = other RNA
actccagccccacagcctcagc

SEQ ID NO: 64558 - RNA, 21 nt, Synthetic Construct
  source 1..21: mol_type = other RNA
actggacttggagtcagaagg

SEQ ID NO: 64559 - RNA, 21 nt, Synthetic Construct
  source 1..21: mol_type = other RNA
actggacttggagtcagaagg

SEQ ID NO: 64560 - RNA, 19 nt, Synthetic Construct
  source 1..19: mol_type = other RNA
tcagtagctcgaggaaaag

SEQ ID NO: 64561 - RNA, 22 nt, Synthetic Construct
  source 1..22: mol_type = other RNA
gtccagttttcccaggaatccc

SEQ ID NO: 64562 - RNA, 22 nt, Synthetic Construct
  source 1..22: mol_type = other RNA
gtccagttttcccaggaatccc

SEQ ID NO: 64563 - RNA, 23 nt, Synthetic Construct
  source 1..23: mol_type = other RNA
tgaggggcagagagcgagactta

SEQ ID NO: 64564 - RNA, 22 nt, Synthetic Construct
  source 1..22: mol_type = other RNA
caaagaattctccttttgggct

SEQ ID NO: 64565 - RNA, 22 nt, Synthetic Construct
  source 1..22: mol_type = other RNA
tgaggaagtaggttgtgtggtt

SEQ ID NO: 64566 - RNA, 26 nt, Synthetic Construct
  source 1..26: mol_type = other RNA
atttccccttggggttgtaggaccac

SEQ ID NO: 64567 - RNA, 27 nt, Synthetic Construct
  source 1..27: mol_type = other RNA
ggggagctaatcccagaaacccggtcg

SEQ ID NO: 64568 - RNA, 27 nt, Synthetic Construct
  source 1..27: mol_type = other RNA
ggggagctaatcccagaaacccggtcg

SEQ ID NO: 64569 - RNA, 32 nt, Synthetic Construct; identical to SEQ ID NO: 14681
  source 1..32: mol_type = other RNA

SEQ ID NO: 64570 - RNA, 32 nt, Synthetic Construct; identical to SEQ ID NO: 14681
  source 1..32: mol_type = other RNA

SEQ ID NO: 64571 - RNA, 16 nt, Synthetic Construct
  source 1..16: mol_type = other RNA
tgcacgaaagcgtggg

SEQ ID NO: 64572 - RNA, 22 nt, Synthetic Construct
  source 1..22: mol_type = other RNA
tgaggtagtagtttgtgctgta

SEQ ID NO: 64573 - RNA, 22 nt, Synthetic Construct
  source 1..22: mol_type = other RNA
tgaggtagtagtttgtgctgta

SEQ ID NO: 64574 - RNA, 27 nt, Synthetic Construct
  source 1..27: mol_type = other RNA
ccccccaatgctaaatttgactggctt

SEQ ID NO: 64575 - RNA, 22 nt, Synthetic Construct
  source 1..22: mol_type = other RNA
tgtaaacatccccgactggagg

SEQ ID NO: 64576 - RNA, 22 nt, Synthetic Construct
  source 1..22: mol_type = other RNA
tgtaaacatccccgactggagg

SEQ ID NO: 64577 - RNA, 22 nt, Synthetic Construct
  source 1..22: mol_type = other RNA
ctggctagggaaaatgattgga

SEQ ID NO: 64578 - RNA, 22 nt, Synthetic Construct
  source 1..22: mol_type = other RNA
ctggctagggaaaatgattgga

SEQ ID NO: 64579 - RNA, 23 nt, Synthetic Construct
  source 1..23: mol_type = other RNA
tcctgtactgagttgccccgaga

SEQ ID NO: 64580 - RNA, 22 nt, Synthetic Construct
  source 1..22: mol_type = other RNA
atggatttttggagcagggaga

SEQ ID NO: 64581 - RNA, 22 nt, Synthetic Construct
  source 1..22: mol_type = other RNA
atggatttttggagcagggaga

SEQ ID NO: 64582 - RNA, 21 nt, Synthetic Construct
  source 1..21: mol_type = other RNA
tcctgtactgagctgcccaga

SEQ ID NO: 64583 - RNA, 21 nt, Synthetic Construct
  source 1..21: mol_type = other RNA
tcctgtactgagctgcccaga

SEQ ID NO: 64584 - RNA, 22 nt, Synthetic Construct
  source 1..22: mol_type = other RNA
tgaggtagtagtctgtgctgtt

SEQ ID NO: 64585 - RNA, 23 nt, Synthetic Construct
  source 1..23: mol_type = other RNA
tgaggtagtaggttgtatggttt

SEQ ID NO: 64586 - RNA, 23 nt, Synthetic Construct
  source 1..23: mol_type = other RNA
tgaggtagtaggttgtatggttt

SEQ ID NO: 64587 - RNA, 22 nt, Synthetic Construct
  source 1..22: mol_type = other RNA
ccagtgcactacagaactttgt

SEQ ID NO: 64588 - RNA, 22 nt, Synthetic Construct
  source 1..22: mol_type = other RNA
ccagtgcactacagaactttgt

SEQ ID NO: 64589 - RNA, 22 nt, Synthetic Construct
  source 1..22: mol_type = other RNA
gcctgtactgagctgccccgag

SEQ ID NO: 64590 - RNA, 22 nt, Synthetic Construct
  source 1..22: mol_type = other RNA
gcctgtactgagctgccccgag

SEQ ID NO: 64591 - RNA, 21 nt, Synthetic Construct
  source 1..21: mol_type = other RNA
tgaggtagtggattgtatagt

SEQ ID NO: 64592 - RNA, 20 nt, Synthetic Construct
  source 1..20: mol_type = other RNA
tgaggtggtaggttgtgtgg

SEQ ID NO: 64593 - RNA, 23 nt, Synthetic Construct
  source 1..23: mol_type = other RNA
caaagtgctcatagtgcaggtag

SEQ ID NO: 64594 - RNA, 21 nt, Synthetic Construct
  source 1..21: mol_type = other RNA
cggcggggacggcgattggtc

SEQ ID NO: 64595 - RNA, 21 nt, Synthetic Construct
  source 1..21: mol_type = other RNA
cggcggggacggcgattggtc

SEQ ID NO: 64596 - RNA, 21 nt, Synthetic Construct
  source 1..21: mol_type = other RNA
caaagtgctgttcgtgcaggt

SEQ ID NO: 64597 - RNA, 22 nt, Synthetic Construct
  source 1..22: mol_type = other RNA
tgaggtagtaggttgtttagtt

SEQ ID NO: 64598 - RNA, 22 nt, Synthetic Construct
  source 1..22: mol_type = other RNA
tgaggtagtaggttgtttagtt

SEQ ID NO: 64599 - RNA, 18 nt, Synthetic Construct
  source 1..18: mol_type = other RNA
cccaaaggtcgtcggttc

SEQ ID NO: 64600 - RNA, 18 nt, Synthetic Construct
  source 1..18: mol_type = other RNA
cccaaaggtcgtcggttc

SEQ ID NO: 64601 - RNA, 25 nt, Synthetic Construct
  source 1..25: mol_type = other RNA
ggtaaaatcgctgagtgaagcattg

SEQ ID NO: 64602 - RNA, 21 nt, Synthetic Construct
  source 1..21: mol_type = other RNA
tgaggtagtaggttgcatagt

SEQ ID NO: 64603 - RNA, 21 nt, Synthetic Construct
  source 1..21: mol_type = other RNA
cctctgggcccttcctccagt

SEQ ID NO: 64604 - RNA, 21 nt, Synthetic Construct
  source 1..21: mol_type = other RNA
tgtaaacatcctacactctca

SEQ ID NO: 64605 - RNA, 21 nt, Synthetic Construct
  source 1..21: mol_type = other RNA
tgtaaacatcctacactctca

SEQ ID NO: 64606 - RNA, 21 nt, Synthetic Construct
  source 1..21: mol_type = other RNA
cagcattgtacagggctatga

SEQ ID NO: 64607 - RNA, 20 nt, Synthetic Construct
  source 1..20: mol_type = other RNA
tgaggcagtaggttgtgtgg

SEQ ID NO: 64608 - RNA, 26 nt, Synthetic Construct
  source 1..26: mol_type = other RNA
ttaagtgacgatagcctaggagatac

SEQ ID NO: 64609 - RNA, 26 nt, Synthetic Construct
  source 1..26: mol_type = other RNA
ttaagtgacgatagcctaggagatac

SEQ ID NO: 64610 - RNA, 22 nt, Synthetic Construct
  source 1..22: mol_type = other RNA
tgaggtagtaggttgtgtggtg

SEQ ID NO: 64611 - RNA, 22 nt, Synthetic Construct
  source 1..22: mol_type = other RNA
tcgcagcacgtaaatattggcg

SEQ ID NO: 64612 - RNA, 31 nt, Synthetic Construct; identical to SEQ ID NO: 2412
  source 1..31: mol_type = other RNA

SEQ ID NO: 64613 - RNA, 23 nt, Synthetic Construct
  source 1..23: mol_type = other RNA
tctcacacagaaatcgcacccgt

SEQ ID NO: 64614 - RNA, 21 nt, Synthetic Construct
  source 1..21: mol_type = other RNA
tgaagtagtaggttgtatagt

SEQ ID NO: 64615 - RNA, 21 nt, Synthetic Construct
  source 1..21: mol_type = other RNA
tgaagtagtaggttgtatagt

SEQ ID NO: 64616 - RNA, 25 nt, Synthetic Construct
  source 1..25: mol_type = other RNA
tcggatccgtctgagcttggctttt

SEQ ID NO: 64617 - RNA, 19 nt, Synthetic Construct
  source 1..19: mol_type = other RNA
cgcgacctcagatcagacg

SEQ ID NO: 64618 - RNA, 19 nt, Synthetic Construct
  source 1..19: mol_type = other RNA
cgcgacctcagatcagacg

SEQ ID NO: 64619 - RNA, 16 nt, Synthetic Construct
  source 1..16: mol_type = other RNA
agttgaccgcctgggg

SEQ ID NO: 64620 - RNA, 16 nt, Synthetic Construct
  source 1..16: mol_type = other RNA
agttgaccgcctgggg

SEQ ID NO: 64621 - RNA, 21 nt, Synthetic Construct
  source 1..21: mol_type = other RNA
tggggtgtgacaatggtgttt

SEQ ID NO: 64622 - RNA, 22 nt, Synthetic Construct
  source 1..22: mol_type = other RNA
tggctcagttcagcaggaacgg

SEQ ID NO: 64623 - RNA, 22 nt, Synthetic Construct
  source 1..22: mol_type = other RNA
tggctcagttcagcaggaacgg

SEQ ID NO: 64624 - RNA, 18 nt, Synthetic Construct
  source 1..18: mol_type = other RNA
gtccggatcgtagtctgc

SEQ ID NO: 64625 - RNA, 18 nt, Synthetic Construct
  source 1..18: mol_type = other RNA
gtccggatcgtagtctgc

SEQ ID NO: 64626 - RNA, 24 nt, Synthetic Construct
  source 1..24: mol_type = other RNA
aggaagccctggaggggctggagg

SEQ ID NO: 64627 - RNA, 21 nt, Synthetic Construct
  source 1..21: mol_type = other RNA
aatggcgccactagggttgtg

SEQ ID NO: 64628 - RNA, 21 nt, Synthetic Construct
  source 1..21: mol_type = other RNA
aatggcgccactagggttgtg

SEQ ID NO: 64629 - RNA, 41 nt, Synthetic Construct; identical to SEQ ID NO: 8929
  source 1..41: mol_type = other RNA

SEQ ID NO: 64630 - RNA, 41 nt, Synthetic Construct; identical to SEQ ID NO: 8929
  source 1..41: mol_type = other RNA

SEQ ID NO: 64631 - RNA, 22 nt, Synthetic Construct
  source 1..22: mol_type = other RNA
gcgtaccgtgagtaataatgcg

SEQ ID NO: 64632 - RNA, 22 nt, Synthetic Construct
  source 1..22: mol_type = other RNA
gcgtaccgtgagtaataatgcg

SEQ ID NO: 64633 - RNA, 23 nt, Synthetic Construct
  source 1..23: mol_type = other RNA
tcgtaccgtgagtaataatgcgt

SEQ ID NO: 64634 - RNA, 23 nt, Synthetic Construct
  source 1..23: mol_type = other RNA
tcgtaccgtgagtaataatgcgt

SEQ ID NO: 64635 - RNA, 22 nt, Synthetic Construct
  source 1..22: mol_type = other RNA
tagcagcacgtaaaaattggcg

SEQ ID NO: 64636 - RNA, 22 nt, Synthetic Construct
  source 1..22: mol_type = other RNA
tagcagcacgtaaaaattggcg

SEQ ID NO: 64637 - RNA, 25 nt, Synthetic Construct
  source 1..25: mol_type = other RNA
tgaggtagtaggttgtgtggttttt

SEQ ID NO: 64638 - RNA, 22 nt, Synthetic Construct
  source 1..22: mol_type = other RNA
tgaggtagcagattgtatagtt

SEQ ID NO: 64639 - RNA, 25 nt, Synthetic Construct
  source 1..25: mol_type = other RNA
ccccccactgctaaatttgactggc

SEQ ID NO: 64640 - RNA, 25 nt, Synthetic Construct
  source 1..25: mol_type = other RNA
ccccccactgctaaatttgactggc

SEQ ID NO: 64641 - RNA, 17 nt, Synthetic Construct
  source 1..17: mol_type = other RNA
tcagtagctcgaggaaa

SEQ ID NO: 64642 - RNA, 17 nt, Synthetic Construct
  source 1..17: mol_type = other RNA
tcagtagctcgaggaaa

SEQ ID NO: 64643 - RNA, 34 nt, Synthetic Construct; identical to SEQ ID NO: 1526
  source 1..34: mol_type = other RNA

SEQ ID NO: 64644 - RNA, 34 nt, Synthetic Construct; identical to SEQ ID NO: 1526
  source 1..34: mol_type = other RNA

SEQ ID NO: 64645 - RNA, 27 nt, Synthetic Construct
  source 1..27: mol_type = other RNA
ccccccactgctaaatttggctggcta

SEQ ID NO: 64646 - RNA, 27 nt, Synthetic Construct
  source 1..27: mol_type = other RNA
ccccccactgctaaatttggctggcta

SEQ ID NO: 64647 - RNA, 21 nt, Synthetic Construct
  source 1..21: mol_type = other RNA
tgaggtagtaggttgcatagt

SEQ ID NO: 64648 - RNA, 15 nt, Synthetic Construct
  source 1..15: mol_type = other RNA
gcagagcgtcggtct

SEQ ID NO: 64649 - RNA, 15 nt, Synthetic Construct
  source 1..15: mol_type = other RNA
gcagagcgtcggtct

SEQ ID NO: 64650 - RNA, 22 nt, Synthetic Construct
  source 1..22: mol_type = other RNA
tgaggtagtaggtagtgtggtt

SEQ ID NO: 64651 - RNA, 22 nt, Synthetic Construct
  source 1..22: mol_type = other RNA
tgaggtagtaggtagtgtggtt

SEQ ID NO: 64652 - RNA, 23 nt, Synthetic Construct
  source 1..23: mol_type = other RNA
tgaggtagtaggttgtgtggtta

SEQ ID NO: 64653 - RNA, 23 nt, Synthetic Construct
  source 1..23: mol_type = other RNA
tgaggtagtaggttgtgtggtta

SEQ ID NO: 64654 - RNA, 21 nt, Synthetic Construct
  source 1..21: mol_type = other RNA
tggagtgtgacaacggtgttt

SEQ ID NO: 64655 - RNA, 23 nt, Synthetic Construct
  source 1..23: mol_type = other RNA
tccagtactgagctgccccgagt

SEQ ID NO: 64656 - RNA, 21 nt, Synthetic Construct
  source 1..21: mol_type = other RNA
tgaggtagtaggttgtgtggt

SEQ ID NO: 64657 - RNA, 16 nt, Synthetic Construct
  source 1..16: mol_type = other RNA
gtctatggccatacca

SEQ ID NO: 64658 - RNA, 16 nt, Synthetic Construct
  source 1..16: mol_type = other RNA
gtctatggccatacca

SEQ ID NO: 64659 - RNA, 24 nt, Synthetic Construct
  source 1..24: mol_type = other RNA
tcccacatggtctagcggttagga

SEQ ID NO: 64660 - RNA, 22 nt, Synthetic Construct
  source 1..22: mol_type = other RNA
tagtaccgtgagtaataatgcg

SEQ ID NO: 64661 - RNA, 22 nt, Synthetic Construct
  source 1..22: mol_type = other RNA
tagtaccgtgagtaataatgcg

SEQ ID NO: 64662 - RNA, 24 nt, Synthetic Construct
  source 1..24: mol_type = other RNA
tgtaaacatccccggctggaagct

SEQ ID NO: 64663 - RNA, 22 nt, Synthetic Construct
  source 1..22: mol_type = other RNA
tgaggaagtagtttgtgctgtt

SEQ ID NO: 64664 - RNA, 22 nt, Synthetic Construct
  source 1..22: mol_type = other RNA
tgtggtgtttcctactttatgg

SEQ ID NO: 64665 - RNA, 22 nt, Synthetic Construct
  source 1..22: mol_type = other RNA
tgtggtgtttcctactttatgg

SEQ ID NO: 64666 - RNA, 21 nt, Synthetic Construct
  source 1..21: mol_type = other RNA
tccctgtcctccaggagctca

SEQ ID NO: 64667 - RNA, 22 nt, Synthetic Construct
  source 1..22: mol_type = other RNA
tagcaccatttgaaatcggtta

SEQ ID NO: 64668 - RNA, 35 nt, Synthetic Construct; identical to SEQ ID NO: 2762
  source 1..35: mol_type = other RNA

SEQ ID NO: 64669 - RNA, 38 nt, Synthetic Construct; identical to SEQ ID NO: 7148
  source 1..38: mol_type = other RNA

SEQ ID NO: 64670 - RNA, 38 nt, Synthetic Construct; identical to SEQ ID NO: 7148
  source 1..38: mol_type = other RNA

SEQ ID NO: 64671 - RNA, 22 nt, Synthetic Construct
  source 1..22: mol_type = other RNA
tattgcatttgtcccggcctgt

SEQ ID NO: 64672 - RNA, 22 nt, Synthetic Construct
  source 1..22: mol_type = other RNA
aggaatgtaaagaagtatgtat

SEQ ID NO: 64673 - RNA, 31 nt, Synthetic Construct; identical to SEQ ID NO: 955
  source 1..31: mol_type = other RNA

SEQ ID NO: 64674 - RNA, 31 nt, Synthetic Construct; identical to SEQ ID NO: 955
  source 1..31: mol_type = other RNA

SEQ ID NO: 64675 - RNA, 18 nt, Synthetic Construct
  source 1..18: mol_type = other RNA
cgcgacctcagatcagac

SEQ ID NO: 64676 - RNA, 22 nt, Synthetic Construct
  source 1..22: mol_type = other RNA
tcgtaccgtgagtaataatgcg

SEQ ID NO: 64677 - RNA, 23 nt, Synthetic Construct
  source 1..23: mol_type = other RNA
tattgcacttgtcccggcctgaa

SEQ ID NO: 64678 - RNA, 22 nt, Synthetic Construct
  source 1..22: mol_type = other RNA
tgaggtagtagtttgagctgtt

SEQ ID NO: 64679 - RNA, 24 nt, Synthetic Construct
  source 1..24: mol_type = other RNA
tgaggtagtaggttgtgtggttgt

SEQ ID NO: 64680 - RNA, 24 nt, Synthetic Construct
  source 1..24: mol_type = other RNA
tgaggtagtaggttgtgtggttgt

SEQ ID NO: 64681 - RNA, 22 nt, Synthetic Construct
  source 1..22: mol_type = other RNA
cgcgacctcagatcagacgtgg

SEQ ID NO: 64682 - RNA, 27 nt, Synthetic Construct
  source 1..27: mol_type = other RNA
catgcgagagtaggacgttgccaggtt

SEQ ID NO: 64683 - RNA, 27 nt, Synthetic Construct
  source 1..27: mol_type = other RNA
catgcgagagtaggacgttgccaggtt

SEQ ID NO: 64684 - RNA, 22 nt, Synthetic Construct
  source 1..22: mol_type = other RNA
ngaggtagtagtttgtgctgtt

SEQ ID NO: 64685 - RNA, 22 nt, Synthetic Construct
  source 1..22: mol_type = other RNA
tagcttatcagactgatgttgg

SEQ ID NO: 64686 - RNA, 23 nt, Synthetic Construct
  source 1..23: mol_type = other RNA
ggaggggcagagagcgagacttt

SEQ ID NO: 64687 - RNA, 23 nt, Synthetic Construct
  source 1..23: mol_type = other RNA
ggaggggcagagagcgagacttt

SEQ ID NO: 64688 - RNA, 21 nt, Synthetic Construct
  source 1..21: mol_type = other RNA
tgagatgaagcactgtagctc

SEQ ID NO: 64689 - RNA, 22 nt, Synthetic Construct
  source 1..22: mol_type = other RNA
gaagaggacttggaactcgatc

SEQ ID NO: 64690 - RNA, 22 nt, Synthetic Construct
  source 1..22: mol_type = other RNA
gaagaggacttggaactcgatc

SEQ ID NO: 64691 - RNA, 22 nt, Synthetic Construct
  source 1..22: mol_type = other RNA
ngaggtagtagattgtatagtt

SEQ ID NO: 64692 - RNA, 22 nt, Synthetic Construct
  source 1..22: mol_type = other RNA
ngaggtagtagattgtatagtt

SEQ ID NO: 64693 - RNA, 22 nt, Synthetic Construct
  source 1..22: mol_type = other RNA
ttcaagtaatccaggataggcc

SEQ ID NO: 64694 - RNA, 22 nt, Synthetic Construct
  source 1..22: mol_type = other RNA
tagctgcacgtaaatattggcg

SEQ ID NO: 64695 - RNA, 22 nt, Synthetic Construct
  source 1..22: mol_type = other RNA
tagctgcacgtaaatattggcg

SEQ ID NO: 64696 - RNA, 20 nt, Synthetic Construct
  source 1..20: mol_type = other RNA
cccgtgttcggaagattttc

SEQ ID NO: 64697 - RNA, 20 nt, Synthetic Construct
  source 1..20: mol_type = other RNA
cccgtgttcggaagattttc

SEQ ID NO: 64698 - RNA, 25 nt, Synthetic Construct
  source 1..25: mol_type = other RNA
ttgaggatatgagatcgaggcgaca

SEQ ID NO: 64699 - RNA, 23 nt, Synthetic Construct
  source 1..23: mol_type = other RNA
tggctcagttcagcaggaacaga

SEQ ID NO: 64700 - RNA, 27 nt, Synthetic Construct
  source 1..27: mol_type = other RNA
ccccccactgctaaatctgactggctt

SEQ ID NO: 64701 - RNA, 19 nt, Synthetic Construct
  source 1..19: mol_type = other RNA
agctacattgtctgctggg

SEQ ID NO: 64702 - RNA, 19 nt, Synthetic Construct
  source 1..19: mol_type = other RNA
agctacattgtctgctggg

SEQ ID NO: 64703 - RNA, 32 nt, Synthetic Construct; identical to SEQ ID NO: 37450
  source 1..32: mol_type = other RNA

SEQ ID NO: 64704 - RNA, 32 nt, Synthetic Construct; identical to SEQ ID NO: 37450
  source 1..32: mol_type = other RNA

SEQ ID NO: 64705 - RNA, 22 nt, Synthetic Construct
  source 1..22: mol_type = other RNA
atataatacaacctgctaagtg

SEQ ID NO: 64706 - RNA, 22 nt, Synthetic Construct
  source 1..22: mol_type = other RNA
atataatacaacctgctaagtg

SEQ ID NO: 64707 - RNA, 21 nt, Synthetic Construct
  source 1..21: mol_type = other RNA
tgaggtagtaggttgcgtggt

SEQ ID NO: 64708 - RNA, 20 nt, Synthetic Construct
  source 1..20: mol_type = other RNA
caaagtgctgttcgtgcagg

SEQ ID NO: 64709 - RNA, 20 nt, Synthetic Construct
  source 1..20: mol_type = other RNA
caaagtgctgttcgtgcagg

SEQ ID NO: 64710 - RNA, 24 nt, Synthetic Construct
  source 1..24: mol_type = other RNA
tccctgagaccctttaacctgtgt

SEQ ID NO: 64711 - RNA, 22 nt, Synthetic Construct
  source 1..22: mol_type = other RNA
cgaggtagtagattgtatagtt

SEQ ID NO: 64712 - RNA, 22 nt, Synthetic Construct
  source 1..22: mol_type = other RNA
tagcagctcgtaaatattggcg

SEQ ID NO: 64713 - RNA, 22 nt, Synthetic Construct
  source 1..22: mol_type = other RNA
tagcagctcgtaaatattggcg

SEQ ID NO: 64714 - RNA, 23 nt, Synthetic Construct
  source 1..23: mol_type = other RNA
taaagtgctgttcgtgcaggtag

SEQ ID NO: 64715 - RNA, 23 nt, Synthetic Construct
  source 1..23: mol_type = other RNA
taaagtgctgttcgtgcaggtag

SEQ ID NO: 64716 - RNA, 21 nt, Synthetic Construct
  source 1..21: mol_type = other RNA
tacagtagtctgcacattggt

SEQ ID NO: 64717 - RNA, 21 nt, Synthetic Construct
  source 1..21: mol_type = other RNA
tacagtagtctgcacattggt

SEQ ID NO: 64718 - RNA, 22 nt, Synthetic Construct
  source 1..22: mol_type = other RNA
tgaggtagtagattgtaaagtt

SEQ ID NO: 64719 - RNA, 22 nt, Synthetic Construct
  source 1..22: mol_type = other RNA
tgaggtagtagattgtaaagtt

SEQ ID NO: 64720 - RNA, 27 nt, Synthetic Construct
  source 1..27: mol_type = other RNA
ccccccactgctaaatttgaccggctt

SEQ ID NO: 64721 - RNA, 22 nt, Synthetic Construct
  source 1..22: mol_type = other RNA
tgaggtagtaggttgtatagta

SEQ ID NO: 64722 - RNA, 21 nt, Synthetic Construct
  source 1..21: mol_type = other RNA
tgaggaagtaggttgtgtggt

SEQ ID NO: 64723 - RNA, 21 nt, Synthetic Construct
  source 1..21: mol_type = other RNA
gcccgtgttcggaagattttc

SEQ ID NO: 64724 - RNA, 22 nt, Synthetic Construct
  source 1..22: mol_type = other RNA
atataatacaacctgctaagtg

SEQ ID NO: 64725 - RNA, 21 nt, Synthetic Construct
  source 1..21: mol_type = other RNA
tgaggaagtaggttgtgtggt

SEQ ID NO: 64726 - RNA, 23 nt, Synthetic Construct
  source 1..23: mol_type = other RNA
tgtcagtttgtcaaatacccctt

SEQ ID NO: 64727 - RNA, 22 nt, Synthetic Construct
  source 1..22: mol_type = other RNA
tactgcacttgtcccggcctgt

SEQ ID NO: 64728 - RNA, 22 nt, Synthetic Construct
  source 1..22: mol_type = other RNA
tactgcacttgtcccggcctgt

SEQ ID NO: 64729 - RNA, 25 nt, Synthetic Construct
  source 1..25: mol_type = other RNA
tgagaactgaattccataggctgtt

SEQ ID NO: 64730 - RNA, 21 nt, Synthetic Construct
  source 1..21: mol_type = other RNA
tgaggtagcagattgtatagt

SEQ ID NO: 64731 - RNA, 30 nt, Synthetic Construct; identical to SEQ ID NO: 1236
  source 1..30: mol_type = other RNA

SEQ ID NO: 64732 - RNA, 15 nt, Synthetic Construct
  source 1..15: mol_type = other RNA
tggccgtcgtcagct

SEQ ID NO: 64733 - RNA, 15 nt, Synthetic Construct
  source 1..15: mol_type = other RNA
tggccgtcgtcagct

SEQ ID NO: 64734 - RNA, 23 nt, Synthetic Construct
  source 1..23: mol_type = other RNA
tgagcgcctcgacgacagagccg

SEQ ID NO: 64735 - RNA, 26 nt, Synthetic Construct
  source 1..26: mol_type = other RNA
tgtccccgcgaggggcccggggcggg

SEQ ID NO: 64736 - RNA, 17 nt, Synthetic Construct
  source 1..17: mol_type = other RNA
gcggctgtagctcagtt

SEQ ID NO: 64737 - RNA, 23 nt, Synthetic Construct
  source 1..23: mol_type = other RNA
tcagtgcatcacagaactttgtt

SEQ ID NO: 64738 - RNA, 41 nt, Synthetic Construct; identical to SEQ ID NO: 1667
  source 1..41: mol_type = other RNA

SEQ ID NO: 64739 - RNA, 41 nt, Synthetic Construct; identical to SEQ ID NO: 1667
  source 1..41: mol_type = other RNA

SEQ ID NO: 64740 - RNA, 22 nt, Synthetic Construct
  source 1..22: mol_type = other RNA
gagagcctggacacaggtgctg

SEQ ID NO: 64741 - RNA, 23 nt, Synthetic Construct
  source 1..23: mol_type = other RNA
caaagtgctgttcatgcaggtag

SEQ ID NO: 64742 - RNA, 23 nt, Synthetic Construct
  source 1..23: mol_type = other RNA
caaagtgctgttcatgcaggtag

SEQ ID NO: 64743 - RNA, 23 nt, Synthetic Construct
  source 1..23: mol_type = other RNA
naaagtgctgttcgtgcaggtag

SEQ ID NO: 64744 - RNA, 23 nt, Synthetic Construct
  source 1..23: mol_type = other RNA
caaagtgctgtacgtgcaggtag

SEQ ID NO: 64745 - RNA, 23 nt, Synthetic Construct
  source 1..23: mol_type = other RNA
caaagtgctgtacgtgcaggtag

SEQ ID NO: 64746 - RNA, 22 nt, Synthetic Construct
  source 1..22: mol_type = other RNA
tacccattgcatatcggagttg

SEQ ID NO: 64747 - RNA, 22 nt, Synthetic Construct
  source 1..22: mol_type = other RNA
tacccattgcatatcggagttg

SEQ ID NO: 64748 - RNA, 38 nt, Synthetic Construct; identical to SEQ ID NO: 1537
  source 1..38: mol_type = other RNA

SEQ ID NO: 64749 - RNA, 38 nt, Synthetic Construct; identical to SEQ ID NO: 1537
  source 1..38: mol_type = other RNA

SEQ ID NO: 64750 - RNA, 22 nt, Synthetic Construct
  source 1..22: mol_type = other RNA
ttcaggtaatccaggataggct

SEQ ID NO: 64751 - RNA, 22 nt, Synthetic Construct
  source 1..22: mol_type = other RNA
ttcaggtaatccaggataggct

SEQ ID NO: 64752 - RNA, 30 nt, Synthetic Construct; identical to SEQ ID NO: 1236
  source 1..30: mol_type = other RNA

SEQ ID NO: 64753 - RNA, 23 nt, Synthetic Construct
  source 1..23: mol_type = other RNA
tgaggggcagagagcgagactta

SEQ ID NO: 64754 - RNA, 18 nt, Synthetic Construct
  source 1..18: mol_type = other RNA
agggaacgtgagctgggt

SEQ ID NO: 64755 - RNA, 18 nt, Synthetic Construct
  source 1..18: mol_type = other RNA
agggaacgtgagctgggt

SEQ ID NO: 64756 - RNA, 20 nt, Synthetic Construct
  source 1..20: mol_type = other RNA
tgaggaagtaggttgtatag

SEQ ID NO: 64757 - RNA, 21 nt, Synthetic Construct
  source 1..21: mol_type = other RNA
aggagtgtgacaatggtgttt

SEQ ID NO: 64758 - RNA, 21 nt, Synthetic Construct
  source 1..21: mol_type = other RNA
aggagtgtgacaatggtgttt

SEQ ID NO: 64759 - RNA, 19 nt, Synthetic Construct
  source 1..19: mol_type = other RNA
aggacagtgaaacgagtca

SEQ ID NO: 64760 - RNA, 19 nt, Synthetic Construct
  source 1..19: mol_type = other RNA
aggacagtgaaacgagtca

SEQ ID NO: 64761 - RNA, 23 nt, Synthetic Construct
  source 1..23: mol_type = other RNA
tgtgcaaatccatgcaaaactga

SEQ ID NO: 64762 - RNA, 20 nt, Synthetic Construct
  source 1..20: mol_type = other RNA
tgaggtggtaggttgtatag

SEQ ID NO: 64763 - RNA, 22 nt, Synthetic Construct
  source 1..22: mol_type = other RNA
tgaggtagtaggttgtggggtt

SEQ ID NO: 64764 - RNA, 22 nt, Synthetic Construct
  source 1..22: mol_type = other RNA
tattgcacttgtcccggtctgt

SEQ ID NO: 64765 - RNA, 22 nt, Synthetic Construct
  source 1..22: mol_type = other RNA
tagcagcacatcatggtttaca

SEQ ID NO: 64766 - RNA, 22 nt, Synthetic Construct
  source 1..22: mol_type = other RNA
tagcagcacatcatggtttaca

SEQ ID NO: 64767 - RNA, 22 nt, Synthetic Construct
  source 1..22: mol_type = other RNA
tcgtaccgtgagtgataatgcg

SEQ ID NO: 64768 - RNA, 22 nt, Synthetic Construct
  source 1..22: mol_type = other RNA
tcgtaccgtgagtgataatgcg

SEQ ID NO: 64769 - RNA, 23 nt, Synthetic Construct
  source 1..23: mol_type = other RNA
acagtagtctgcacattggttat

SEQ ID NO: 64770 - RNA, 21 nt, Synthetic Construct
  source 1..21: mol_type = other RNA
tcctgaactgagctgccccga

SEQ ID NO: 64771 - RNA, 15 nt, Synthetic Construct
  source 1..15: mol_type = other RNA
tggccgtcgtcagct

SEQ ID NO: 64772 - RNA, 15 nt, Synthetic Construct
  source 1..15: mol_type = other RNA
tggccgtcgtcagct

SEQ ID NO: 64773 - RNA, 24 nt, Synthetic Construct
  source 1..24: mol_type = other RNA
gggttgtaaaccgcttttgtcagg

SEQ ID NO: 64774 - RNA, 18 nt, Synthetic Construct
  source 1..18: mol_type = other RNA
gtcaggatggccgagcgg

SEQ ID NO: 64775 - RNA, 23 nt, Synthetic Construct
  source 1..23: mol_type = other RNA
aacattcaacgctgtcggtgaga

SEQ ID NO: 64776 - RNA, 21 nt, Synthetic Construct
  source 1..21: mol_type = other RNA
aatgacacgatcactcccgtt

SEQ ID NO: 64777 - RNA, 22 nt, Synthetic Construct
  source 1..22: mol_type = other RNA
ggaggtagtagattgtatagtt

SEQ ID NO: 64778 - RNA, 22 nt, Synthetic Construct
  source 1..22: mol_type = other RNA
ggaggtagtagattgtatagtt

SEQ ID NO: 64779 - RNA, 33 nt, Synthetic Construct; identical to SEQ ID NO: 10461
  source 1..33: mol_type = other RNA

SEQ ID NO: 64780 - RNA, 29 nt, Synthetic Construct
  source 1..29: mol_type = other RNA
cccccccactgctaaatttgactggctta

SEQ ID NO: 64781 - RNA, 21 nt, Synthetic Construct
  source 1..21: mol_type = other RNA
agcagcattgtacagggctat

SEQ ID NO: 64782 - RNA, 32 nt, Synthetic Construct; identical to SEQ ID NO: 14097
  source 1..32: mol_type = other RNA

SEQ ID NO: 64783 - RNA, 19 nt, Synthetic Construct
  source 1..19: mol_type = other RNA
aggacagtgaaacgagtca

SEQ ID NO: 64784 - RNA, 22 nt, Synthetic Construct
  source 1..22: mol_type = other RNA
cattattacttttggtacgcgc

SEQ ID NO: 64785 - RNA, 22 nt, Synthetic Construct
  source 1..22: mol_type = other RNA
tacccattgcatatcggagttg

SEQ ID NO: 64786 - RNA, 22 nt, Synthetic Construct
  source 1..22: mol_type = other RNA
tacccattgcatatcggagttg

SEQ ID NO: 64787 - RNA, 17 nt, Synthetic Construct
  source 1..17: mol_type = other RNA
cccctggacctgtactg

SEQ ID NO: 64788 - RNA, 30 nt, Synthetic Construct; identical to SEQ ID NO: 1771
  source 1..30: mol_type = other RNA

SEQ ID NO: 64789 - RNA, 22 nt, Synthetic Construct
  source 1..22: mol_type = other RNA
tggaatgtaaagaggtatgtat

SEQ ID NO: 64790 - RNA, 23 nt, Synthetic Construct
  source 1..23: mol_type = other RNA
tgaggtagtaggttgtatagtta

SEQ ID NO: 64791 - RNA, 22 nt, Synthetic Construct
  source 1..22: mol_type = other RNA
cattattacttttggtacgcga

SEQ ID NO: 64792 - RNA, 22 nt, Synthetic Construct
  source 1..22: mol_type = other RNA
cattattacttttggtacgcga

SEQ ID NO: 64793 - RNA, 27 nt, Synthetic Construct
  source 1..27: mol_type = other RNA
agagcagctaataccgcatacgacctg

SEQ ID NO: 64794 - RNA, 25 nt, Synthetic Construct
  source 1..25: mol_type = other RNA
gcgggcatagcttagtggtaaagtt

SEQ ID NO: 64795 - RNA, 25 nt, Synthetic Construct
  source 1..25: mol_type = other RNA
gcgggcatagcttagtggtaaagtt

SEQ ID NO: 64796 - RNA, 18 nt, Synthetic Construct
  source 1..18: mol_type = other RNA
aagaccctgttgagcttg

SEQ ID NO: 64797 - RNA, 18 nt, Synthetic Construct
  source 1..18: mol_type = other RNA
aagaccctgttgagcttg

SEQ ID NO: 64798 - RNA, 30 nt, Synthetic Construct; identical to SEQ ID NO: 2407
  source 1..30: mol_type = other RNA

SEQ ID NO: 64799 - RNA, 21 nt, Synthetic Construct
  source 1..21: mol_type = other RNA
cactgatcgagtcgtcctgcg

SEQ ID NO: 64800 - RNA, 23 nt, Synthetic Construct
  source 1..23: mol_type = other RNA
ggcagggttcgtgactggggtga

SEQ ID NO: 64801 - RNA, 27 nt, Synthetic Construct
  source 1..27: mol_type = other RNA
ccccccactgctaaacttgactggctt

SEQ ID NO: 64802 - RNA, 27 nt, Synthetic Construct
  source 1..27: mol_type = other RNA
ccccccactgctaaacttgactggctt

SEQ ID NO: 64803 - RNA, 22 nt, Synthetic Construct
  source 1..22: mol_type = other RNA
aggaatgtaaagaagtatgtat

SEQ ID NO: 64804 - RNA, 22 nt, Synthetic Construct
  source 1..22: mol_type = other RNA
aggaatgtaaagaagtatgtat

SEQ ID NO: 64805 - RNA, 22 nt, Synthetic Construct
  source 1..22: mol_type = other RNA
tgaggtagtaatttgtgctgtt

SEQ ID NO: 64806 - RNA, 22 nt, Synthetic Construct
  source 1..22: mol_type = other RNA
accatcgaccgttgattgtacc

SEQ ID NO: 64807 - RNA, 20 nt, Synthetic Construct
  source 1..20: mol_type = other RNA
ccttggggttgtaggaccac

SEQ ID NO: 64808 - RNA, 34 nt, Synthetic Construct; identical to SEQ ID NO: 8274
  source 1..34: mol_type = other RNA

SEQ ID NO: 64809 - RNA, 34 nt, Synthetic Construct; identical to SEQ ID NO: 8274
  source 1..34: mol_type = other RNA

SEQ ID NO: 64810 - RNA, 22 nt, Synthetic Construct
  source 1..22: mol_type = other RNA
tccagtactgagctgccccgag

SEQ ID NO: 64811 - RNA, 19 nt, Synthetic Construct
  source 1..19: mol_type = other RNA
ccgtgttcggaagattttc

SEQ ID NO: 64812 - RNA, 23 nt, Synthetic Construct
  source 1..23: mol_type = other RNA
aaaagctgggttgagagggcgaa

SEQ ID NO: 64813 - RNA, 23 nt, Synthetic Construct
  source 1..23: mol_type = other RNA
aaaagctgggttgagagggcgaa

SEQ ID NO: 64814 - RNA, 22 nt, Synthetic Construct
  source 1..22: mol_type = other RNA
taaggtagtagattgtatagtt

SEQ ID NO: 64815 - RNA, 23 nt, Synthetic Construct
  source 1..23: mol_type = other RNA
tcctgaactgagctgccccgagt

SEQ ID NO: 64816 - RNA, 23 nt, Synthetic Construct
  source 1..23: mol_type = other RNA
tcctgaactgagctgccccgagt

SEQ ID NO: 64817 - RNA, 24 nt, Synthetic Construct
  source 1..24: mol_type = other RNA
tcttggagtaggtcattgggtggt

SEQ ID NO: 64818 - RNA, 24 nt, Synthetic Construct
  source 1..24: mol_type = other RNA
tcttggagtaggtcattgggtggt

SEQ ID NO: 64819 - RNA, 25 nt, Synthetic Construct
  source 1..25: mol_type = other RNA
tcccactgcttcacttgactagcct

SEQ ID NO: 64820 - RNA, 18 nt, Synthetic Construct
  source 1..18: mol_type = other RNA
tcttcggtagtatagtgg

SEQ ID NO: 64821 - RNA, 22 nt, Synthetic Construct
  source 1..22: mol_type = other RNA
tccaagtaattcaggataggtt

SEQ ID NO: 64822 - RNA, 22 nt, Synthetic Construct
  source 1..22: mol_type = other RNA
tccaagtaattcaggataggtt

SEQ ID NO: 64823 - RNA, 15 nt, Synthetic Construct
  source 1..15: mol_type = other RNA
ggtagcgtggccgag

SEQ ID NO: 64824 - RNA, 15 nt, Synthetic Construct
  source 1..15: mol_type = other RNA
ggtagcgtggccgag

SEQ ID NO: 64825 - RNA, 21 nt, Synthetic Construct
  source 1..21: mol_type = other RNA
tgaggtagtaggttgtatagc

SEQ ID NO: 64826 - RNA, 21 nt, Synthetic Construct
  source 1..21: mol_type = other RNA
tgaggtagtaggttgtatagc

SEQ ID NO: 64827 - RNA, 27 nt, Synthetic Construct
  source 1..27: mol_type = other RNA
tcccccactgctaaatttgactggctt

SEQ ID NO: 64828 - RNA, 22 nt, Synthetic Construct
  source 1..22: mol_type = other RNA
tctttgttcgattccgttgagt

SEQ ID NO: 64829 - RNA, 22 nt, Synthetic Construct
  source 1..22: mol_type = other RNA
tctttgttcgattccgttgagt

SEQ ID NO: 64830 - RNA, 16 nt, Synthetic Construct
  source 1..16: mol_type = other RNA
gtctacggccgtacca

SEQ ID NO: 64831 - RNA, 21 nt, Synthetic Construct
  source 1..21: mol_type = other RNA
tgaggcagtaggttgtgtggt

SEQ ID NO: 64832 - RNA, 22 nt, Synthetic Construct
  source 1..22: mol_type = other RNA
agtaaacatccccgactggaag

SEQ ID NO: 64833 - RNA, 26 nt, Synthetic Construct
  source 1..26: mol_type = other RNA
ttaagtgacgatagcctaggagatac

SEQ ID NO: 64834 - RNA, 26 nt, Synthetic Construct
  source 1..26: mol_type = other RNA
ttaagtgacgatagcctaggagatac

SEQ ID NO: 64835 - RNA, 22 nt, Synthetic Construct
  source 1..22: mol_type = other RNA
tcaggtagtagattgtatagtt

SEQ ID NO: 64836 - RNA, 28 nt, Synthetic Construct
  source 1..28: mol_type = other RNA
ccccccactgctaaatttgactggcctt

SEQ ID NO: 64837 - RNA, 28 nt, Synthetic Construct
  source 1..28: mol_type = other RNA
ccccccactgctaaatttgactggcctt

SEQ ID NO: 64838 - RNA, 43 nt, Synthetic Construct; identical to SEQ ID NO: 2315
  source 1..43: mol_type = other RNA

SEQ ID NO: 64839 - RNA, 23 nt, Synthetic Construct
  source 1..23: mol_type = other RNA
tcctgtactgagccgccccgagt

SEQ ID NO: 64840 - RNA, 18 nt, Synthetic Construct
  source 1..18: mol_type = other RNA
atcacattgccagggatt

SEQ ID NO: 64841 - RNA, 18 nt, Synthetic Construct
  source 1..18: mol_type = other RNA
atcacattgccagggatt

SEQ ID NO: 64842 - RNA, 22 nt, Synthetic Construct
  source 1..22: mol_type = other RNA
tgaggtagtaggctgtatagtt

SEQ ID NO: 64843 - RNA, 22 nt, Synthetic Construct
  source 1..22: mol_type = other RNA
tgaggtagtaggctgtatagtt

SEQ ID NO: 64844 - RNA, 18 nt, Synthetic Construct
  source 1..18: mol_type = other RNA
agggaacgtgagctgggt

SEQ ID NO: 64845 - RNA, 23 nt, Synthetic Construct
  source 1..23: mol_type = other RNA
gaatgttgctcggtgaacccctt

SEQ ID NO: 64846 - RNA, 22 nt, Synthetic Construct
  source 1..22: mol_type = other RNA
tggaatgtagagaagtatgtat

SEQ ID NO: 64847 - RNA, 25 nt, Synthetic Construct
  source 1..25: mol_type = other RNA
ctgaggatatgagatcgagacgaca

SEQ ID NO: 64848 - RNA, 20 nt, Synthetic Construct
  source 1..20: mol_type = other RNA
tgaggtagtaggttgtataa

SEQ ID NO: 64849 - RNA, 20 nt, Synthetic Construct
  source 1..20: mol_type = other RNA
tgaggtagtaggttgtataa

SEQ ID NO: 64850 - RNA, 18 nt, Synthetic Construct
  source 1..18: mol_type = other RNA
cattcttgcgacccgggt

SEQ ID NO: 64851 - RNA, 18 nt, Synthetic Construct
  source 1..18: mol_type = other RNA
cattcttgcgacccgggt

SEQ ID NO: 64852 - RNA, 20 nt, Synthetic Construct
  source 1..20: mol_type = other RNA
tgaggtagcaggttgtatag

SEQ ID NO: 64853 - RNA, 31 nt, Synthetic Construct; identical to SEQ ID NO: 62408
  source 1..31: mol_type = other RNA

SEQ ID NO: 64854 - RNA, 19 nt, Synthetic Construct
  source 1..19: mol_type = other RNA
gctattgacgaccgtaccg

SEQ ID NO: 64855 - RNA, 19 nt, Synthetic Construct
  source 1..19: mol_type = other RNA
gctattgacgaccgtaccg

SEQ ID NO: 64856 - RNA, 21 nt, Synthetic Construct
  source 1..21: mol_type = other RNA
tggagtgtgacaatggtgttc

SEQ ID NO: 64857 - RNA, 21 nt, Synthetic Construct
  source 1..21: mol_type = other RNA
tggagtgtgacaatggtgttc

SEQ ID NO: 64858 - RNA, 23 nt, Synthetic Construct
  source 1..23: mol_type = other RNA
tgtcagtttgccaaataccccaa

SEQ ID NO: 64859 - RNA, 23 nt, Synthetic Construct
  source 1..23: mol_type = other RNA
tgtcagtttgccaaataccccaa

SEQ ID NO: 64860 - RNA, 20 nt, Synthetic Construct
  source 1..20: mol_type = other RNA
tagaattctcgcctgccacg

SEQ ID NO: 64861 - RNA, 24 nt, Synthetic Construct
  source 1..24: mol_type = other RNA
tgaggtagtaggttgtgtggttgt

SEQ ID NO: 64862 - RNA, 22 nt, Synthetic Construct
  source 1..22: mol_type = other RNA
tgaggtggtagattgtatagtt

SEQ ID NO: 64863 - RNA, 22 nt, Synthetic Construct
  source 1..22: mol_type = other RNA
tgaggtagtagtttgtgctgat

SEQ ID NO: 64864 - RNA, 23 nt, Synthetic Construct
  source 1..23: mol_type = other RNA
acagtagtctgcacattggttaa

SEQ ID NO: 64865 - RNA, 23 nt, Synthetic Construct
  source 1..23: mol_type = other RNA
acagtagtctgcacattggttaa

SEQ ID NO: 64866 - RNA, 19 nt, Synthetic Construct
  source 1..19: mol_type = other RNA
tggctcagttcagcaggaa

SEQ ID NO: 64867 - RNA, 23 nt, Synthetic Construct
  source 1..23: mol_type = other RNA
gtgcagatcttggtggtagtagc

SEQ ID NO: 64868 - RNA, 22 nt, Synthetic Construct
  source 1..22: mol_type = other RNA
ttcaagtaattcaggataggtt

SEQ ID NO: 64869 - RNA, 22 nt, Synthetic Construct
  source 1..22: mol_type = other RNA
acagtagtctgcgcattggtta

SEQ ID NO: 64870 - RNA, 22 nt, Synthetic Construct
  source 1..22: mol_type = other RNA
tcctgtactgagcagccccgag

SEQ ID NO: 64871 - RNA, 22 nt, Synthetic Construct
  source 1..22: mol_type = other RNA
tcctgtactgagcagccccgag

SEQ ID NO: 64872 - RNA, 23 nt, Synthetic Construct
  source 1..23: mol_type = other RNA
tctttggttatctagctgtatgt

SEQ ID NO: 64873 - RNA, 23 nt, Synthetic Construct
  source 1..23: mol_type = other RNA
tctttggttatctagctgtatgt

SEQ ID NO: 64874 - RNA, 22 nt, Synthetic Construct
  source 1..22: mol_type = other RNA
ngaggtagtagtttgtgctgtt

SEQ ID NO: 64875 - RNA, 24 nt, Synthetic Construct
  source 1..24: mol_type = other RNA
caacggaatcccaaaagcagctgc

SEQ ID NO: 64876 - RNA, 21 nt, Synthetic Construct
  source 1..21: mol_type = other RNA
tgtaccgtgagtaataatgcg

SEQ ID NO: 64877 - RNA, 22 nt, Synthetic Construct
  source 1..22: mol_type = other RNA
cattgcactagtctcggtctga

SEQ ID NO: 64878 - RNA, 22 nt, Synthetic Construct
  source 1..22: mol_type = other RNA
cattgcactagtctcggtctga

SEQ ID NO: 64879 - RNA, 23 nt, Synthetic Construct
  source 1..23: mol_type = other RNA
tgaggtagtaggttgtgtggtaa

SEQ ID NO: 64880 - RNA, 22 nt, Synthetic Construct
  source 1..22: mol_type = other RNA
tgaggtagtagactgtatagtt

SEQ ID NO: 64881 - RNA, 21 nt, Synthetic Construct
  source 1..21: mol_type = other RNA
tgaggtagaaggttgtatagt

SEQ ID NO: 64882 - RNA, 22 nt, Synthetic Construct
  source 1..22: mol_type = other RNA
tgaggtagtagtttgtactgtt

SEQ ID NO: 64883 - RNA, 22 nt, Synthetic Construct
  source 1..22: mol_type = other RNA
tgaggtagtagtttgtactgtt

SEQ ID NO: 64884 - RNA, 27 nt, Synthetic Construct
  source 1..27: mol_type = other RNA
ccccccactgctaaattagactggctt

SEQ ID NO: 64885 - RNA, 22 nt, Synthetic Construct
  source 1..22: mol_type = other RNA
tgaggtagtagtttgtgctggt

SEQ ID NO: 64886 - RNA, 22 nt, Synthetic Construct
  source 1..22: mol_type = other RNA
tgaggtagtagtttgtgctggt

SEQ ID NO: 64887 - RNA, 18 nt, Synthetic Construct
  source 1..18: mol_type = other RNA
aaccgggcggaaacacca

SEQ ID NO: 64888 - RNA, 32 nt, Synthetic Construct; identical to SEQ ID NO: 30748
  source 1..32: mol_type = other RNA

SEQ ID NO: 64889 - RNA, 21 nt, Synthetic Construct
  source 1..21: mol_type = other RNA
taactcctaagcgaatctcgc

SEQ ID NO: 64890 - RNA, 21 nt, Synthetic Construct
  source 1..21: mol_type = other RNA
taactcctaagcgaatctcgc

SEQ ID NO: 64891 - RNA, 20 nt, Synthetic Construct
  source 1..20: mol_type = other RNA
tctcccaacccttgtaccag

SEQ ID NO: 64892 - RNA, 20 nt, Synthetic Construct
  source 1..20: mol_type = other RNA
tctcccaacccttgtaccag

SEQ ID NO: 64893 - RNA, 24 nt, Synthetic Construct
  source 1..24: mol_type = other RNA
tgtaaacatccccgaccggaagct

SEQ ID NO: 64894 - RNA, 24 nt, Synthetic Construct
  source 1..24: mol_type = other RNA
tgtaaacatccccgaccggaagct

SEQ ID NO: 64895 - RNA, 16 nt, Synthetic Construct
  source 1..16: mol_type = other RNA
gcggtggatgatgtgg

SEQ ID NO: 64896 - RNA, 24 nt, Synthetic Construct
  source 1..24: mol_type = other RNA
aacattcattgctgtcggtgggtt

SEQ ID NO: 64897 - RNA, 17 nt, Synthetic Construct
  source 1..17: mol_type = other RNA
ttggagggcaagtctgg

SEQ ID NO: 64898 - RNA, 22 nt, Synthetic Construct
  source 1..22: mol_type = other RNA
tgaggtagcagtttgtgctgtt

SEQ ID NO: 64899 - RNA, 23 nt, Synthetic Construct
  source 1..23: mol_type = other RNA
caacgggatcccaaaagcagctg

SEQ ID NO: 64900 - RNA, 23 nt, Synthetic Construct
  source 1..23: mol_type = other RNA
caacgggatcccaaaagcagctg

SEQ ID NO: 64901 - RNA, 22 nt, Synthetic Construct
  source 1..22: mol_type = other RNA
tcgaaccgtgagtaataatgcg

SEQ ID NO: 64902 - RNA, 22 nt, Synthetic Construct
  source 1..22: mol_type = other RNA
tcgaaccgtgagtaataatgcg

SEQ ID NO: 64903 - RNA, 22 nt, Synthetic Construct
  source 1..22: mol_type = other RNA
ctagcaccatttgaaatcagtg

SEQ ID NO: 64904 - RNA, 22 nt, Synthetic Construct
  source 1..22: mol_type = other RNA
ctagcaccatttgaaatcagtg

SEQ ID NO: 64905 - RNA, 20 nt, Synthetic Construct
  source 1..20: mol_type = other RNA
tagcttatcagactgatgtt

SEQ ID NO: 64906 - RNA, 20 nt, Synthetic Construct
  source 1..20: mol_type = other RNA
tagcttatcagactgatgtt

SEQ ID NO: 64907 - RNA, 23 nt, Synthetic Construct
  source 1..23: mol_type = other RNA
tggtaatacgacgcacttagtgt

SEQ ID NO: 64908 - RNA, 16 nt, Synthetic Construct
  source 1..16: mol_type = other RNA
caggacggtggccatg

SEQ ID NO: 64909 - RNA, 23 nt, Synthetic Construct
  source 1..23: mol_type = other RNA
caaagtgctgttcgtgcgggtag

SEQ ID NO: 64910 - RNA, 23 nt, Synthetic Construct
  source 1..23: mol_type = other RNA
caaagtgctgttcgtgcgggtag

SEQ ID NO: 64911 - RNA, 21 nt, Synthetic Construct
  source 1..21: mol_type = other RNA
attgcacttgtcccggcctgt

SEQ ID NO: 64912 - RNA, 21 nt, Synthetic Construct
  source 1..21: mol_type = other RNA
attgcacttgtcccggcctgt

SEQ ID NO: 64913 - RNA, 16 nt, Synthetic Construct
  source 1..16: mol_type = other RNA
gatctgtagctggtct

SEQ ID NO: 64914 - RNA, 21 nt, Synthetic Construct
  source 1..21: mol_type = other RNA
tttgttcgttcggctcgcgtg

SEQ ID NO: 64915 - RNA, 21 nt, Synthetic Construct
  source 1..21: mol_type = other RNA
tttgttcgttcggctcgcgtg

SEQ ID NO: 64916 - RNA, 18 nt, Synthetic Construct
  source 1..18: mol_type = other RNA
accaaggggtcgtgggtt

SEQ ID NO: 64917 - RNA, 20 nt, Synthetic Construct
  source 1..20: mol_type = other RNA
cacatgcaagtcgaacggta

SEQ ID NO: 64918 - RNA, 23 nt, Synthetic Construct
  source 1..23: mol_type = other RNA
taccctgtagaaccgaatttgtg

SEQ ID NO: 64919 - RNA, 22 nt, Synthetic Construct
  source 1..22: mol_type = other RNA
tgaggtagtaggttgtgtggtt

SEQ ID NO: 64920 - RNA, 22 nt, Synthetic Construct
  source 1..22: mol_type = other RNA
tgaggtagtaggttgtgtggtt

SEQ ID NO: 64921 - RNA, 21 nt, Synthetic Construct
  source 1..21: mol_type = other RNA
taaacggcgggagtaactatg

SEQ ID NO: 64922 - RNA, 20 nt, Synthetic Construct
  source 1..20: mol_type = other RNA
gcatggccgttcttagttgg

SEQ ID NO: 64923 - RNA, 20 nt, Synthetic Construct
  source 1..20: mol_type = other RNA
gcatggccgttcttagttgg

SEQ ID NO: 64924 - RNA, 22 nt, Synthetic Construct
  source 1..22: mol_type = other RNA
tggagtgtaaagaagtatgtat

SEQ ID NO: 64925 - RNA, 20 nt, Synthetic Construct
  source 1..20: mol_type = other RNA
tgaggtagtaggttgtgtgt

SEQ ID NO: 64926 - RNA, 20 nt, Synthetic Construct
  source 1..20: mol_type = other RNA
tgaggtagtaggttgtgtgt

SEQ ID NO: 64927 - RNA, 39 nt, Synthetic Construct; identical to SEQ ID NO: 759
  source 1..39: mol_type = other RNA

SEQ ID NO: 64928 - RNA, 39 nt, Synthetic Construct; identical to SEQ ID NO: 759
  source 1..39: mol_type = other RNA

SEQ ID NO: 64929 - RNA, 16 nt, Synthetic Construct
  source 1..16: mol_type = other RNA
tggagtgtgacaatgg

SEQ ID NO: 64930 - RNA, 23 nt, Synthetic Construct
  source 1..23: mol_type = other RNA
taccctgtagaaccgaatttgtg

SEQ ID NO: 64931 - RNA, 23 nt, Synthetic Construct
  source 1..23: mol_type = other RNA
taccctgtagaaccgaatttgtg

SEQ ID NO: 64932 - RNA, 24 nt, Synthetic Construct
  source 1..24: mol_type = other RNA
caaagtgctgttcgtgcaggtaga

SEQ ID NO: 64933 - RNA, 24 nt, Synthetic Construct
  source 1..24: mol_type = other RNA
caaagtgctgttcgtgcaggtaga

SEQ ID NO: 64934 - RNA, 23 nt, Synthetic Construct
  source 1..23: mol_type = other RNA
cgctcacggaaagagaatgaagc

SEQ ID NO: 64935 - RNA, 23 nt, Synthetic Construct
  source 1..23: mol_type = other RNA
cgctcacggaaagagaatgaagc

SEQ ID NO: 64936 - RNA, 23 nt, Synthetic Construct
  source 1..23: mol_type = other RNA
gtcagtttgtcaaataccccaaa

SEQ ID NO: 64937 - RNA, 27 nt, Synthetic Construct
  source 1..27: mol_type = other RNA
ccccccactgctaaacttgactggctt

SEQ ID NO: 64938 - RNA, 27 nt, Synthetic Construct
  source 1..27: mol_type = other RNA
ccccccactgctaaacttgactggctt

SEQ ID NO: 64939 - RNA, 23 nt, Synthetic Construct
  source 1..23: mol_type = other RNA
cagcccgtgttcggaagattttc

SEQ ID NO: 64940 - RNA, 23 nt, Synthetic Construct
  source 1..23: mol_type = other RNA
cagcccgtgttcggaagattttc

SEQ ID NO: 64941 - RNA, 21 nt, Synthetic Construct
  source 1..21: mol_type = other RNA
tcacagtgaaccggtctcttt

SEQ ID NO: 64942 - RNA, 21 nt, Synthetic Construct
  source 1..21: mol_type = other RNA
tcacagtgaaccggtctcttt

SEQ ID NO: 64943 - RNA, 19 nt, Synthetic Construct
  source 1..19: mol_type = other RNA
cagcactctgcaaagacga

SEQ ID NO: 64944 - RNA, 23 nt, Synthetic Construct
  source 1..23: mol_type = other RNA
tctcccaacccttgtaccagtgt

SEQ ID NO: 64945 - RNA, 23 nt, Synthetic Construct
  source 1..23: mol_type = other RNA
tctcccaacccttgtaccagtgt

SEQ ID NO: 64946 - RNA, 24 nt, Synthetic Construct
  source 1..24: mol_type = other RNA
tgtaaacatccttgactggaagct

SEQ ID NO: 64947 - RNA, 24 nt, Synthetic Construct
  source 1..24: mol_type = other RNA
tgtaaacatccttgactggaagct

SEQ ID NO: 64948 - RNA, 22 nt, Synthetic Construct
  source 1..22: mol_type = other RNA
ngaggtagtaggttgtgtggtt

SEQ ID NO: 64949 - RNA, 22 nt, Synthetic Construct
  source 1..22: mol_type = other RNA
tgaggtagtggtttgtgctgtt

SEQ ID NO: 64950 - RNA, 22 nt, Synthetic Construct
  source 1..22: mol_type = other RNA
tgaggcagtaggttgtatagtt

SEQ ID NO: 64951 - RNA, 17 nt, Synthetic Construct
  source 1..17: mol_type = other RNA
tagggaacgtgagctgg

SEQ ID NO: 64952 - RNA, 27 nt, Synthetic Construct
  source 1..27: mol_type = other RNA
gcgggcgtagctcaggggtagagcgca

SEQ ID NO: 64953 - RNA, 27 nt, Synthetic Construct
  source 1..27: mol_type = other RNA
gcgggcgtagctcaggggtagagcgca

SEQ ID NO: 64954 - RNA, 21 nt, Synthetic Construct
  source 1..21: mol_type = other RNA
ttagtgacgcgcatgaatgga

SEQ ID NO: 64955 - RNA, 21 nt, Synthetic Construct
  source 1..21: mol_type = other RNA
ttagtgacgcgcatgaatgga

SEQ ID NO: 64956 - RNA, 23 nt, Synthetic Construct
  source 1..23: mol_type = other RNA
ttatggtttgcctgggactgagt

SEQ ID NO: 64957 - RNA, 36 nt, Synthetic Construct; identical to SEQ ID NO: 744
  source 1..36: mol_type = other RNA

SEQ ID NO: 64958 - RNA, 22 nt, Synthetic Construct
  source 1..22: mol_type = other RNA
acagtagcctgcacattggtta

SEQ ID NO: 64959 - RNA, 22 nt, Synthetic Construct
  source 1..22: mol_type = other RNA
acagtagcctgcacattggtta

SEQ ID NO: 64960 - RNA, 16 nt, Synthetic Construct
  source 1..16: mol_type = other RNA
ctctacggccatacca

SEQ ID NO: 64961 - RNA, 16 nt, Synthetic Construct
  source 1..16: mol_type = other RNA
ctctacggccatacca

SEQ ID NO: 64962 - RNA, 22 nt, Synthetic Construct
  source 1..22: mol_type = other RNA
tgaggtagtagattgtatagct

SEQ ID NO: 64963 - RNA, 23 nt, Synthetic Construct
  source 1..23: mol_type = other RNA
agcagcattgtacagggctatct

SEQ ID NO: 64964 - RNA, 22 nt, Synthetic Construct
  source 1..22: mol_type = other RNA
tgaggtagtaggtagtatagtt

SEQ ID NO: 64965 - RNA, 22 nt, Synthetic Construct
  source 1..22: mol_type = other RNA
tgaggtagtaggtagtatagtt

SEQ ID NO: 64966 - RNA, 21 nt, Synthetic Construct
  source 1..21: mol_type = other RNA
ctttgttcgattccgttgagt

SEQ ID NO: 64967 - RNA, 21 nt, Synthetic Construct
  source 1..21: mol_type = other RNA
ctttgttcgattccgttgagt

SEQ ID NO: 64968 - RNA, 20 nt, Synthetic Construct
  source 1..20: mol_type = other RNA
gcatggccgttcttagttgg

SEQ ID NO: 64969 - RNA, 20 nt, Synthetic Construct
  source 1..20: mol_type = other RNA
gcatggccgttcttagttgg

SEQ ID NO: 64970 - RNA, 29 nt, Synthetic Construct
  source 1..29: mol_type = other RNA
cccccccactgctaaatttgactggctta

SEQ ID NO: 64971 - RNA, 29 nt, Synthetic Construct
  source 1..29: mol_type = other RNA
cccccccactgctaaatttgactggctta

SEQ ID NO: 64972 - RNA, 25 nt, Synthetic Construct
  source 1..25: mol_type = other RNA
atgaggatatgagatcgagacgaca

SEQ ID NO: 64973 - RNA, 22 nt, Synthetic Construct
  source 1..22: mol_type = other RNA
tattgcacttgacccggcctgt

SEQ ID NO: 64974 - RNA, 22 nt, Synthetic Construct
  source 1..22: mol_type = other RNA
tattgcacttgacccggcctgt

SEQ ID NO: 64975 - RNA, 19 nt, Synthetic Construct
  source 1..19: mol_type = other RNA
aaaagctgggttgagaggg

SEQ ID NO: 64976 - RNA, 19 nt, Synthetic Construct
  source 1..19: mol_type = other RNA
aaaagctgggttgagaggg

SEQ ID NO: 64977 - RNA, 22 nt, Synthetic Construct
  source 1..22: mol_type = other RNA
tgttggttcaagcgtgtagtcg

SEQ ID NO: 64978 - RNA, 24 nt, Synthetic Construct
  source 1..24: mol_type = other RNA
gctcactgatcgagtcgtcctgcg

SEQ ID NO: 64979 - RNA, 24 nt, Synthetic Construct
  source 1..24: mol_type = other RNA
gctcactgatcgagtcgtcctgcg

SEQ ID NO: 64980 - RNA, 17 nt, Synthetic Construct
  source 1..17: mol_type = other RNA
cgactcttagcggtgga

SEQ ID NO: 64981 - RNA, 17 nt, Synthetic Construct
  source 1..17: mol_type = other RNA
cgactcttagcggtgga

SEQ ID NO: 64982 - RNA, 23 nt, Synthetic Construct
  source 1..23: mol_type = other RNA
tgtaaacatccttgactggaagc

SEQ ID NO: 64983 - RNA, 24 nt, Synthetic Construct
  source 1..24: mol_type = other RNA
aaaagctgggttgagagggcgttt

SEQ ID NO: 64984 - RNA, 24 nt, Synthetic Construct
  source 1..24: mol_type = other RNA
aaaagctgggttgagagggcgttt

SEQ ID NO: 64985 - RNA, 27 nt, Synthetic Construct
  source 1..27: mol_type = other RNA
ccccccactgctaaaattgactggctt

SEQ ID NO: 64986 - RNA, 21 nt, Synthetic Construct
  source 1..21: mol_type = other RNA
caaagtgctgttcgtgcaggt

SEQ ID NO: 64987 - RNA, 21 nt, Synthetic Construct
  source 1..21: mol_type = other RNA
caaagtgctgttcgtgcaggt

SEQ ID NO: 64988 - RNA, 20 nt, Synthetic Construct
  source 1..20: mol_type = other RNA
tgaggtagtaggttgtgagg

SEQ ID NO: 64989 - RNA, 21 nt, Synthetic Construct
  source 1..21: mol_type = other RNA
agtcagtttgtcaaatacccc

SEQ ID NO: 64990 - RNA, 21 nt, Synthetic Construct
  source 1..21: mol_type = other RNA
tgaggtagtagattgtatagt

SEQ ID NO: 64991 - RNA, 23 nt, Synthetic Construct
  source 1..23: mol_type = other RNA
tgccagtttgtcaaataccccaa

SEQ ID NO: 64992 - RNA, 23 nt, Synthetic Construct
  source 1..23: mol_type = other RNA
tgccagtttgtcaaataccccaa

SEQ ID NO: 64993 - RNA, 22 nt, Synthetic Construct
  source 1..22: mol_type = other RNA
tgtagtgttccctactttatgg

SEQ ID NO: 64994 - RNA, 22 nt, Synthetic Construct
  source 1..22: mol_type = other RNA
tgtagtgttccctactttatgg

SEQ ID NO: 64995 - RNA, 22 nt, Synthetic Construct
  source 1..22: mol_type = other RNA
tgaggtagtagattgtatggtt

SEQ ID NO: 64996 - RNA, 22 nt, Synthetic Construct
  source 1..22: mol_type = other RNA
tgaggtagtagattgtatggtt

SEQ ID NO: 64997 - RNA, 20 nt, Synthetic Construct
  source 1..20: mol_type = other RNA
tgaggtagtaggttgtatag

SEQ ID NO: 64998 - RNA, 20 nt, Synthetic Construct
  source 1..20: mol_type = other RNA
tgaggtagtaggttgtatag

SEQ ID NO: 64999 - RNA, 21 nt, Synthetic Construct
  source 1..21: mol_type = other RNA
tgaggtagtggattgtatagt

SEQ ID NO: 65000 - RNA, 22 nt, Synthetic Construct
  source 1..22: mol_type = other RNA
tcgtaccgtgagaaataatgcg

SEQ ID NO: 65001 - RNA, 22 nt, Synthetic Construct
  source 1..22: mol_type = other RNA
tcgtaccgtgagaaataatgcg

SEQ ID NO: 65002 - RNA, 22 nt, Synthetic Construct
  source 1..22: mol_type = other RNA
tggcagtgtcttagctggttgt

SEQ ID NO: 65003 - RNA, 22 nt, Synthetic Construct
  source 1..22: mol_type = other RNA
tggcagtgtcttagctggttgt

SEQ ID NO: 65004 - RNA, 23 nt, Synthetic Construct
  source 1..23: mol_type = other RNA
agcagcatcgtacagggctatga

SEQ ID NO: 65005 - RNA, 22 nt, Synthetic Construct
  source 1..22: mol_type = other RNA
tagcagcacgtaaatagtggcg

SEQ ID NO: 65006 - RNA, 22 nt, Synthetic Construct
  source 1..22: mol_type = other RNA
tagcagcacgtaaatagtggcg

SEQ ID NO: 65007 - RNA, 32 nt, Synthetic Construct; identical to SEQ ID NO: 989
  source 1..32: mol_type = other RNA

SEQ ID NO: 65008 - RNA, 32 nt, Synthetic Construct; identical to SEQ ID NO: 989
  source 1..32: mol_type = other RNA

SEQ ID NO: 65009 - RNA, 23 nt, Synthetic Construct
  source 1..23: mol_type = other RNA
ttccccttggggttgtaggacca

SEQ ID NO: 65010 - RNA, 22 nt, Synthetic Construct
  source 1..22: mol_type = other RNA
tgaggtaggaggttgtatagtt

SEQ ID NO: 65011 - RNA, 22 nt, Synthetic Construct
  source 1..22: mol_type = other RNA
tgaggtaggaggttgtatagtt

SEQ ID NO: 65012 - RNA, 24 nt, Synthetic Construct
  source 1..24: mol_type = other RNA
tgtcagtttgtcaaataccccaga

SEQ ID NO: 65013 - RNA, 24 nt, Synthetic Construct
  source 1..24: mol_type = other RNA
tgtcagtttgtcaaataccccaga

SEQ ID NO: 65014 - RNA, 24 nt, Synthetic Construct
  source 1..24: mol_type = other RNA
caacggaatcccaaaagcagctat

SEQ ID NO: 65015 - RNA, 26 nt, Synthetic Construct
  source 1..26: mol_type = other RNA
tgtaaacatccttgactggaagcttt

SEQ ID NO: 65016 - RNA, 26 nt, Synthetic Construct
  source 1..26: mol_type = other RNA
tgtaaacatccttgactggaagcttt

SEQ ID NO: 65017 - RNA, 23 nt, Synthetic Construct
  source 1..23: mol_type = other RNA
tcctgtacagagctgccccgaga

SEQ ID NO: 65018 - RNA, 23 nt, Synthetic Construct
  source 1..23: mol_type = other RNA
gcctgtactgagctgccccgaga

SEQ ID NO: 65019 - RNA, 23 nt, Synthetic Construct
  source 1..23: mol_type = other RNA
gcctgtactgagctgccccgaga

SEQ ID NO: 65020 - RNA, 27 nt, Synthetic Construct
  source 1..27: mol_type = other RNA
ccccacactgctaaatttgactggctt

SEQ ID NO: 65021 - RNA, 27 nt, Synthetic Construct
  source 1..27: mol_type = other RNA
ccccacactgctaaatttgactggctt

SEQ ID NO: 65022 - RNA, 23 nt, Synthetic Construct
  source 1..23: mol_type = other RNA
tgaggtagtaggttgtatagttg

SEQ ID NO: 65023 - RNA, 20 nt, Synthetic Construct
  source 1..20: mol_type = other RNA
tcctgtctgaatatgggggg

SEQ ID NO: 65024 - RNA, 24 nt, Synthetic Construct
  source 1..24: mol_type = other RNA
tgagaactgaattccatgggttga

SEQ ID NO: 65025 - RNA, 24 nt, Synthetic Construct
  source 1..24: mol_type = other RNA
tgagaactgaattccatgggttga

SEQ ID NO: 65026 - RNA, 20 nt, Synthetic Construct
  source 1..20: mol_type = other RNA
tgtaaacatccccgactgga

SEQ ID NO: 65027 - RNA, 32 nt, Synthetic Construct; identical to SEQ ID NO: 1237
  source 1..32: mol_type = other RNA

SEQ ID NO: 65028 - RNA, 22 nt, Synthetic Construct
  source 1..22: mol_type = other RNA
tacgcctgtctgagcgtcgctt

SEQ ID NO: 65029 - RNA, 16 nt, Synthetic Construct
  source 1..16: mol_type = other RNA
cacaccgcccgtcgct

SEQ ID NO: 65030 - RNA, 16 nt, Synthetic Construct
  source 1..16: mol_type = other RNA
cacaccgcccgtcgct

SEQ ID NO: 65031 - RNA, 17 nt, Synthetic Construct
  source 1..17: mol_type = other RNA
cgaggatccattggagg

SEQ ID NO: 65032 - RNA, 17 nt, Synthetic Construct
  source 1..17: mol_type = other RNA
cgaggatccattggagg

SEQ ID NO: 65033 - RNA, 23 nt, Synthetic Construct
  source 1..23: mol_type = other RNA
gttctacagtccgacgatcgatc

SEQ ID NO: 65034 - RNA, 23 nt, Synthetic Construct
  source 1..23: mol_type = other RNA
gttctacagtccgacgatcgatc

SEQ ID NO: 65035 - RNA, 25 nt, Synthetic Construct
  source 1..25: mol_type = other RNA
aacattcaacgctgtcggtgagttt

SEQ ID NO: 65036 - RNA, 25 nt, Synthetic Construct
  source 1..25: mol_type = other RNA
aacattcaacgctgtcggtgagttt

SEQ ID NO: 65037 - RNA, 23 nt, Synthetic Construct
  source 1..23: mol_type = other RNA
tcaagagcaataacgaaaaatgt

SEQ ID NO: 65038 - RNA, 23 nt, Synthetic Construct
  source 1..23: mol_type = other RNA
tcaagagcaataacgaaaaatgt

SEQ ID NO: 65039 - RNA, 15 nt, Synthetic Construct
  source 1..15: mol_type = other RNA
cgactcttagcggtg

SEQ ID NO: 65040 - RNA, 15 nt, Synthetic Construct
  source 1..15: mol_type = other RNA
cgactcttagcggtg

SEQ ID NO: 65041 - RNA, 18 nt, Synthetic Construct
  source 1..18: mol_type = other RNA
tgcagatcttggtggtag

SEQ ID NO: 65042 - RNA, 18 nt, Synthetic Construct
  source 1..18: mol_type = other RNA
tgcagatcttggtggtag

SEQ ID NO: 65043 - RNA, 23 nt, Synthetic Construct
  source 1..23: mol_type = other RNA
tgataatacgacgtacttagtgt

SEQ ID NO: 65044 - RNA, 22 nt, Synthetic Construct
  source 1..22: mol_type = other RNA
tgtcagtttgtcaaatacccct

SEQ ID NO: 65045 - RNA, 22 nt, Synthetic Construct
  source 1..22: mol_type = other RNA
tgtcagtttgtcaaatacccct

SEQ ID NO: 65046 - RNA, 22 nt, Synthetic Construct
  source 1..22: mol_type = other RNA
agaggtagtaggttgtgtggtt

SEQ ID NO: 65047 - RNA, 22 nt, Synthetic Construct
  source 1..22: mol_type = other RNA
agaggtagtaggttgtgtggtt

SEQ ID NO: 65048 - RNA, 22 nt, Synthetic Construct
  source 1..22: mol_type = other RNA
tgagaaccgaattccatgggtt

SEQ ID NO: 65049 - RNA, 15 nt, Synthetic Construct
  source 1..15: mol_type = other RNA
acctgcatcgagggt

SEQ ID NO: 65050 - RNA, 23 nt, Synthetic Construct
  source 1..23: mol_type = other RNA
gggtaatacgacgtacttagtgt

SEQ ID NO: 65051 - RNA, 25 nt, Synthetic Construct
  source 1..25: mol_type = other RNA
ttgcagctgcctgggagtgacttca

SEQ ID NO: 65052 - RNA, 25 nt, Synthetic Construct
  source 1..25: mol_type = other RNA
ttgcagctgcctgggagtgacttca

SEQ ID NO: 65053 - RNA, 26 nt, Synthetic Construct
  source 1..26: mol_type = other RNA
tgtaaacatccccgactggaagcttt

SEQ ID NO: 65054 - RNA, 22 nt, Synthetic Construct
  source 1..22: mol_type = other RNA
tgtggtagtagtttgtgctgtt

SEQ ID NO: 65055 - RNA, 23 nt, Synthetic Construct
  source 1..23: mol_type = other RNA
aaaagtgctgttcgtgcaggtag

SEQ ID NO: 65056 - RNA, 23 nt, Synthetic Construct
  source 1..23: mol_type = other RNA
caaagagctgttcgtgcaggtag

SEQ ID NO: 65057 - RNA, 23 nt, Synthetic Construct
  source 1..23: mol_type = other RNA
caaagcgctgttcgtgcaggtag

SEQ ID NO: 65058 - RNA, 23 nt, Synthetic Construct
  source 1..23: mol_type = other RNA
caaagtactgttcgtgcaggtag

SEQ ID NO: 65059 - RNA, 23 nt, Synthetic Construct
  source 1..23: mol_type = other RNA
caaagtgatgttcgtgcaggtag

SEQ ID NO: 65060 - RNA, 23 nt, Synthetic Construct
  source 1..23: mol_type = other RNA
caaagtgcagttcgtgcaggtag

SEQ ID NO: 65061 - RNA, 23 nt, Synthetic Construct
  source 1..23: mol_type = other RNA
caaagtgccgttcgtgcaggtag

SEQ ID NO: 65062 - RNA, 23 nt, Synthetic Construct
  source 1..23: mol_type = other RNA
caaagtgctattcgtgcaggtag

SEQ ID NO: 65063 - RNA, 23 nt, Synthetic Construct
  source 1..23: mol_type = other RNA
caaagtgctgatcgtgcaggtag

SEQ ID NO: 65064 - RNA, 23 nt, Synthetic Construct
  source 1..23: mol_type = other RNA
caaagtgctgctcgtgcaggtag

SEQ ID NO: 65065 - RNA, 23 nt, Synthetic Construct
  source 1..23: mol_type = other RNA
caaagtgctgtacgtgcaggtag

SEQ ID NO: 65066 - RNA, 23 nt, Synthetic Construct
  source 1..23: mol_type = other RNA
caaagtgctgtccgtgcaggtag

SEQ ID NO: 65067 - RNA, 23 nt, Synthetic Construct
  source 1..23: mol_type = other RNA
caaagtgctgttagtgcaggtag

SEQ ID NO: 65068 - RNA, 23 nt, Synthetic Construct
  source 1..23: mol_type = other RNA
caaagtgctgttcatgcaggtag

SEQ ID NO: 65069 - RNA, 23 nt, Synthetic Construct
  source 1..23: mol_type = other RNA
caaagtgctgttcgagcaggtag

SEQ ID NO: 65070 - RNA, 23 nt, Synthetic Construct
  source 1..23: mol_type = other RNA
caaagtgctgttcgcgcaggtag

SEQ ID NO: 65071 - RNA, 23 nt, Synthetic Construct
  source 1..23: mol_type = other RNA
caaagtgctgttcgtacaggtag

SEQ ID NO: 65072 - RNA, 23 nt, Synthetic Construct
  source 1..23: mol_type = other RNA
caaagtgctgttcgtgcaagtag

SEQ ID NO: 65073 - RNA, 23 nt, Synthetic Construct
  source 1..23: mol_type = other RNA
caaagtgctgttcgtgcagatag

SEQ ID NO: 65074 - RNA, 23 nt, Synthetic Construct
  source 1..23: mol_type = other RNA
caaagtgctgttcgtgcaggaag

SEQ ID NO: 65075 - RNA, 23 nt, Synthetic Construct
  source 1..23: mol_type = other RNA
caaagtgctgttcgtgcaggcag

SEQ ID NO: 65076 - RNA, 23 nt, Synthetic Construct
  source 1..23: mol_type = other RNA
caaagtgctgttcgtgcgggtag

SEQ ID NO: 65077 - RNA, 23 nt, Synthetic Construct
  source 1..23: mol_type = other RNA
caaagtgctgttcgtgtaggtag

SEQ ID NO: 65078 - RNA, 23 nt, Synthetic Construct
  source 1..23: mol_type = other RNA
caaagtgttgttcgtgcaggtag

SEQ ID NO: 65079 - RNA, 23 nt, Synthetic Construct
  source 1..23: mol_type = other RNA
caaggtgctgttcgtgcaggtag

SEQ ID NO: 65080 - RNA, 23 nt, Synthetic Construct
  source 1..23: mol_type = other RNA
cagagtgctgttcgtgcaggtag

SEQ ID NO: 65081 - RNA, 23 nt, Synthetic Construct
  source 1..23: mol_type = other RNA
cgaagtgctgttcgtgcaggtag

SEQ ID NO: 65082 - RNA, 23 nt, Synthetic Construct
  source 1..23: mol_type = other RNA
taaagtgctgttcgtgcaggtag

SEQ ID NO: 65083 - RNA, 22 nt, Synthetic Construct
  source 1..22: mol_type = other RNA
aaacggaatcccaaaagcagct

SEQ ID NO: 65084 - RNA, 23 nt, Synthetic Construct
  source 1..23: mol_type = other RNA
aaacggaatcccaaaagcagctg

SEQ ID NO: 65085 - RNA, 23 nt, Synthetic Construct
  source 1..23: mol_type = other RNA
caacggaaacccaaaagcagctg

SEQ ID NO: 65086 - RNA, 23 nt, Synthetic Construct
  source 1..23: mol_type = other RNA
caacggaaccccaaaagcagctg

SEQ ID NO: 65087 - RNA, 23 nt, Synthetic Construct
  source 1..23: mol_type = other RNA
caacggaatcacaaaagcagctg

SEQ ID NO: 65088 - RNA, 23 nt, Synthetic Construct
  source 1..23: mol_type = other RNA
caacggaatcccaaaagcagcag

SEQ ID NO: 65089 - RNA, 23 nt, Synthetic Construct
  source 1..23: mol_type = other RNA
caacggaatcccaaaagcagccg

SEQ ID NO: 65090 - RNA, 23 nt, Synthetic Construct
  source 1..23: mol_type = other RNA
caacggaatcccaaaagcggctg

SEQ ID NO: 65091 - RNA, 23 nt, Synthetic Construct
  source 1..23: mol_type = other RNA
caacggaatcccaaaggcagctg

SEQ ID NO: 65092 - RNA, 23 nt, Synthetic Construct
  source 1..23: mol_type = other RNA
caacggaatcccaagagcagctg

SEQ ID NO: 65093 - RNA, 23 nt, Synthetic Construct
  source 1..23: mol_type = other RNA
caacggaatcccagaagcagctg

SEQ ID NO: 65094 - RNA, 23 nt, Synthetic Construct
  source 1..23: mol_type = other RNA
caacggaatcccgaaagcagctg

SEQ ID NO: 65095 - RNA, 23 nt, Synthetic Construct
  source 1..23: mol_type = other RNA
caacggagtcccaaaagcagctg

SEQ ID NO: 65096 - RNA, 23 nt, Synthetic Construct
  source 1..23: mol_type = other RNA
caacgggatcccaaaagcagctg

SEQ ID NO: 65097 - RNA, 23 nt, Synthetic Construct
  source 1..23: mol_type = other RNA
cagcggaatcccaaaagcagctg

SEQ ID NO: 65098 - RNA, 23 nt, Synthetic Construct
  source 1..23: mol_type = other RNA
cgacggaatcccaaaagcagctg

SEQ ID NO: 65099 - RNA, 22 nt, Synthetic Construct
  source 1..22: mol_type = other RNA
aattgcacttgtctcggtctga

SEQ ID NO: 65100 - RNA, 22 nt, Synthetic Construct
  source 1..22: mol_type = other RNA
caatgcacttgtctcggtctga

SEQ ID NO: 65101 - RNA, 22 nt, Synthetic Construct
  source 1..22: mol_type = other RNA
cactgcacttgtctcggtctga

SEQ ID NO: 65102 - RNA, 22 nt, Synthetic Construct
  source 1..22: mol_type = other RNA
catagcacttgtctcggtctga

SEQ ID NO: 65103 - RNA, 22 nt, Synthetic Construct
  source 1..22: mol_type = other RNA
catcgcacttgtctcggtctga

SEQ ID NO: 65104 - RNA, 22 nt, Synthetic Construct
  source 1..22: mol_type = other RNA
cattgcacctgtctcggtctga

SEQ ID NO: 65105 - RNA, 22 nt, Synthetic Construct
  source 1..22: mol_type = other RNA
cattgcactagtctcggtctga

SEQ ID NO: 65106 - RNA, 22 nt, Synthetic Construct
  source 1..22: mol_type = other RNA
cattgcactcgtctcggtctga

SEQ ID NO: 65107 - RNA, 22 nt, Synthetic Construct
  source 1..22: mol_type = other RNA
cattgcacttgcctcggtctga

SEQ ID NO: 65108 - RNA, 22 nt, Synthetic Construct
  source 1..22: mol_type = other RNA
cattgcacttgtcccggtctga

SEQ ID NO: 65109 - RNA, 22 nt, Synthetic Construct
  source 1..22: mol_type = other RNA
cattgcacttgtctcagtctga

SEQ ID NO: 65110 - RNA, 22 nt, Synthetic Construct
  source 1..22: mol_type = other RNA
cattgcacttgtctcggactga

SEQ ID NO: 65111 - RNA, 22 nt, Synthetic Construct
  source 1..22: mol_type = other RNA
cattgcacttgtctcggcctga

SEQ ID NO: 65112 - RNA, 22 nt, Synthetic Construct
  source 1..22: mol_type = other RNA
cattgcacttgtctcggtccga

SEQ ID NO: 65113 - RNA, 22 nt, Synthetic Construct
  source 1..22: mol_type = other RNA
cattgcgcttgtctcggtctga

SEQ ID NO: 65114 - RNA, 22 nt, Synthetic Construct
  source 1..22: mol_type = other RNA
cgttgcacttgtctcggtctga

SEQ ID NO: 65115 - RNA, 22 nt, Synthetic Construct
  source 1..22: mol_type = other RNA
aaccagcacgtaaatattggcg

SEQ ID NO: 65116 - RNA, 22 nt, Synthetic Construct
  source 1..22: mol_type = other RNA
aagaagcacgtaaatattggcg

SEQ ID NO: 65117 - RNA, 22 nt, Synthetic Construct
  source 1..22: mol_type = other RNA
aagcagaacgtaaatattggcg

SEQ ID NO: 65118 - RNA, 22 nt, Synthetic Construct
  source 1..22: mol_type = other RNA
aagcagcacctaaatattggcg

SEQ ID NO: 65119 - RNA, 22 nt, Synthetic Construct
  source 1..22: mol_type = other RNA
aagcagcacgtaaatattcgcg

SEQ ID NO: 65120 - RNA, 22 nt, Synthetic Construct
  source 1..22: mol_type = other RNA
aagcagcacgtaaatattggag

SEQ ID NO: 65121 - RNA, 23 nt, Synthetic Construct
  source 1..23: mol_type = other RNA
aagcagcacgtaaatattggcgt

SEQ ID NO: 65122 - RNA, 22 nt, Synthetic Construct
  source 1..22: mol_type = other RNA
cagcagcacgtaaatattggcg

SEQ ID NO: 65123 - RNA, 22 nt, Synthetic Construct
  source 1..22: mol_type = other RNA
taccagcacgtaaatattggcg

SEQ ID NO: 65124 - RNA, 22 nt, Synthetic Construct
  source 1..22: mol_type = other RNA
tagaagcacgtaaatattggcg

SEQ ID NO: 65125 - RNA, 22 nt, Synthetic Construct
  source 1..22: mol_type = other RNA
tagcaacacgtaaatattggcg

SEQ ID NO: 65126 - RNA, 22 nt, Synthetic Construct
  source 1..22: mol_type = other RNA
tagcagcaagtaaatattggcg

SEQ ID NO: 65127 - RNA, 22 nt, Synthetic Construct
  source 1..22: mol_type = other RNA
tagcagcacataaatattggcg

SEQ ID NO: 65128 - RNA, 22 nt, Synthetic Construct
  source 1..22: mol_type = other RNA
tagcagcacgaaaatattggcg

SEQ ID NO: 65129 - RNA, 22 nt, Synthetic Construct
  source 1..22: mol_type = other RNA
tagcagcacgcaaatattggcg

SEQ ID NO: 65130 - RNA, 22 nt, Synthetic Construct
  source 1..22: mol_type = other RNA
tagcagcacggaaatattggcg

SEQ ID NO: 65131 - RNA, 22 nt, Synthetic Construct
  source 1..22: mol_type = other RNA
tagcagcacgtaaaaattggcg

SEQ ID NO: 65132 - RNA, 22 nt, Synthetic Construct
  source 1..22: mol_type = other RNA
tagcagcacgtaaacattggcg

SEQ ID NO: 65133 - RNA, 22 nt, Synthetic Construct
  source 1..22: mol_type = other RNA
tagcagcacgtaaagattggcg

SEQ ID NO: 65134 - RNA, 22 nt, Synthetic Construct
  source 1..22: mol_type = other RNA
tagcagcacgtaaatactggcg

SEQ ID NO: 65135 - RNA, 22 nt, Synthetic Construct
  source 1..22: mol_type = other RNA
tagcagcacgtaaatagtggcg

SEQ ID NO: 65136 - RNA, 22 nt, Synthetic Construct
  source 1..22: mol_type = other RNA
tagcagcacgtaaatataggcg

SEQ ID NO: 65137 - RNA, 22 nt, Synthetic Construct
  source 1..22: mol_type = other RNA
tagcagcacgtaaatatcggcg

SEQ ID NO: 65138 - RNA, 22 nt, Synthetic Construct
  source 1..22: mol_type = other RNA
tagcagcacgtaaatatgggcg

SEQ ID NO: 65139 - RNA, 22 nt, Synthetic Construct
  source 1..22: mol_type = other RNA
tagcagcacgtaaatattagcg

SEQ ID NO: 65140 - RNA, 22 nt, Synthetic Construct
  source 1..22: mol_type = other RNA
tagcagcacgtaaatattcgcg

SEQ ID NO: 65141 - RNA, 22 nt, Synthetic Construct
  source 1..22: mol_type = other RNA
tagcagcacgtaaatattgacg

SEQ ID NO: 65142 - RNA, 22 nt, Synthetic Construct
  source 1..22: mol_type = other RNA
tagcagcacgtaaatattgccg

SEQ ID NO: 65143 - RNA, 22 nt, Synthetic Construct
  source 1..22: mol_type = other RNA
tagcagcacgtaaatatttgcg

SEQ ID NO: 65144 - RNA, 22 nt, Synthetic Construct
  source 1..22: mol_type = other RNA
tagcagcacgtaaatgttggcg

SEQ ID NO: 65145 - RNA, 22 nt, Synthetic Construct
  source 1..22: mol_type = other RNA
tagcagcacgtaagtattggcg

SEQ ID NO: 65146 - RNA, 21 nt, Synthetic Construct
  source 1..21: mol_type = other RNA
tagcagcacgtaatattggcg

SEQ ID NO: 65147 - RNA, 22 nt, Synthetic Construct
  source 1..22: mol_type = other RNA
tagcagcacgtacatattggcg

SEQ ID NO: 65148 - RNA, 22 nt, Synthetic Construct
  source 1..22: mol_type = other RNA
tagcagcacgtagatattggcg

SEQ ID NO: 65149 - RNA, 22 nt, Synthetic Construct
  source 1..22: mol_type = other RNA
tagcagcacgtatatattggcg

SEQ ID NO: 65150 - RNA, 22 nt, Synthetic Construct
  source 1..22: mol_type = other RNA
tagcagcacgtgaatattggcg

SEQ ID NO: 65151 - RNA, 22 nt, Synthetic Construct
  source 1..22: mol_type = other RNA
tagcagcacgttaatattggcg

SEQ ID NO: 65152 - RNA, 22 nt, Synthetic Construct
  source 1..22: mol_type = other RNA
tagcagcacttaaatattggcg

SEQ ID NO: 65153 - RNA, 22 nt, Synthetic Construct
  source 1..22: mol_type = other RNA
tagcagcaggtaaatattggcg

SEQ ID NO: 65154 - RNA, 22 nt, Synthetic Construct
  source 1..22: mol_type = other RNA
tagcagcatgtaaatattggcg

SEQ ID NO: 65155 - RNA, 22 nt, Synthetic Construct
  source 1..22: mol_type = other RNA
tagcagcgcgtaaatattggcg

SEQ ID NO: 65156 - RNA, 22 nt, Synthetic Construct
  source 1..22: mol_type = other RNA
tagcagctcgtaaatattggcg

SEQ ID NO: 65157 - RNA, 22 nt, Synthetic Construct
  source 1..22: mol_type = other RNA
tagcaggacgtaaatattggcg

SEQ ID NO: 65158 - RNA, 22 nt, Synthetic Construct
  source 1..22: mol_type = other RNA
tagcagtacgtaaatattggcg

SEQ ID NO: 65159 - RNA, 22 nt, Synthetic Construct
  source 1..22: mol_type = other RNA
tagcatcacgtaaatattggcg

SEQ ID NO: 65160 - RNA, 22 nt, Synthetic Construct
  source 1..22: mol_type = other RNA
tagccgcacgtaaatattggcg

SEQ ID NO: 65161 - RNA, 22 nt, Synthetic Construct
  source 1..22: mol_type = other RNA
tagcggcacgtaaatattggcg

SEQ ID NO: 65162 - RNA, 22 nt, Synthetic Construct
  source 1..22: mol_type = other RNA
tagctgcacgtaaatattggcg

SEQ ID NO: 65163 - RNA, 22 nt, Synthetic Construct
  source 1..22: mol_type = other RNA
taggagcacgtaaatattggcg

SEQ ID NO: 65164 - RNA, 22 nt, Synthetic Construct
  source 1..22: mol_type = other RNA
tagtagcacgtaaatattggcg

SEQ ID NO: 65165 - RNA, 22 nt, Synthetic Construct
  source 1..22: mol_type = other RNA
tatcagcacgtaaatattggcg

SEQ ID NO: 65166 - RNA, 22 nt, Synthetic Construct
  source 1..22: mol_type = other RNA
tcgcagcacgtaaatattggcg

SEQ ID NO: 65167 - RNA, 22 nt, Synthetic Construct
  source 1..22: mol_type = other RNA
tggcagcacgtaaatattggcg

SEQ ID NO: 65168 - RNA, 22 nt, Synthetic Construct
  source 1..22: mol_type = other RNA
ttgcagcacgtaaatattggcg

SEQ ID NO: 65169 - RNA, 22 nt, Synthetic Construct
  source 1..22: mol_type = other RNA
cattgcacttgtcccggcctgt

SEQ ID NO: 65170 - RNA, 22 nt, Synthetic Construct
  source 1..22: mol_type = other RNA
gattgcacttgtcccggcctgt

SEQ ID NO: 65171 - RNA, 22 nt, Synthetic Construct
  source 1..22: mol_type = other RNA
taatgcacttgtcccggcctgt

SEQ ID NO: 65172 - RNA, 22 nt, Synthetic Construct
  source 1..22: mol_type = other RNA
tactgcacttgtcccggcctgt

SEQ ID NO: 65173 - RNA, 22 nt, Synthetic Construct
  source 1..22: mol_type = other RNA
tatagcacttgtcccggcctgt

SEQ ID NO: 65174 - RNA, 22 nt, Synthetic Construct
  source 1..22: mol_type = other RNA
tatcgcacttgtcccggcctgt

SEQ ID NO: 65175 - RNA, 22 nt, Synthetic Construct
  source 1..22: mol_type = other RNA
tattacacttgtcccggcctgt

SEQ ID NO: 65176 - RNA, 22 nt, Synthetic Construct
  source 1..22: mol_type = other RNA
tattgaacttgtcccggcctgt

SEQ ID NO: 65177 - RNA, 22 nt, Synthetic Construct
  source 1..22: mol_type = other RNA
tattgcaattgtcccggcctgt

SEQ ID NO: 65178 - RNA, 22 nt, Synthetic Construct
  source 1..22: mol_type = other RNA
tattgcacatgtcccggcctgt

SEQ ID NO: 65179 - RNA, 22 nt, Synthetic Construct
  source 1..22: mol_type = other RNA
tattgcacctgtcccggcctgt

SEQ ID NO: 65180 - RNA, 22 nt, Synthetic Construct
  source 1..22: mol_type = other RNA
tattgcactcgtcccggcctgt

SEQ ID NO: 65181 - RNA, 22 nt, Synthetic Construct
  source 1..22: mol_type = other RNA
tattgcacttatcccggcctgt

SEQ ID NO: 65182 - RNA, 22 nt, Synthetic Construct
  source 1..22: mol_type = other RNA
tattgcacttgacccggcctgt

SEQ ID NO: 65183 - RNA, 22 nt, Synthetic Construct
  source 1..22: mol_type = other RNA
tattgcacttgccccggcctgt

SEQ ID NO: 65184 - RNA, 22 nt, Synthetic Construct
  source 1..22: mol_type = other RNA
tattgcacttgtcccagcctgt

SEQ ID NO: 65185 - RNA, 22 nt, Synthetic Construct
  source 1..22: mol_type = other RNA
tattgcacttgtcccggactgt

SEQ ID NO: 65186 - RNA, 22 nt, Synthetic Construct
  source 1..22: mol_type = other RNA
tattgcacttgtcccggcccgt

SEQ ID NO: 65187 - RNA, 22 nt, Synthetic Construct
  source 1..22: mol_type = other RNA
tattgcacttgtcccggcctat

SEQ ID NO: 65188 - RNA, 25 nt, Synthetic Construct
  source 1..25: mol_type = other RNA
tattgcacttgtcccggcctgtaat

SEQ ID NO: 65189 - RNA, 24 nt, Synthetic Construct
  source 1..24: mol_type = other RNA
tattgcacttgtcccggcctgtag

SEQ ID NO: 65190 - RNA, 24 nt, Synthetic Construct
  source 1..24: mol_type = other RNA
tattgcacttgtcccggcctgtat

SEQ ID NO: 65191 - RNA, 25 nt, Synthetic Construct
  source 1..25: mol_type = other RNA
tattgcacttgtcccggcctgtatt

SEQ ID NO: 65192 - RNA, 25 nt, Synthetic Construct
  source 1..25: mol_type = other RNA
tattgcacttgtcccggcctgttat

SEQ ID NO: 65193 - RNA, 22 nt, Synthetic Construct
  source 1..22: mol_type = other RNA
tattgcacttgtcccggtctgt

SEQ ID NO: 65194 - RNA, 22 nt, Synthetic Construct
  source 1..22: mol_type = other RNA
tattgcacttgtcctggcctgt

SEQ ID NO: 65195 - RNA, 22 nt, Synthetic Construct
  source 1..22: mol_type = other RNA
tattgcacttgtctcggcctgt

SEQ ID NO: 65196 - RNA, 22 nt, Synthetic Construct
  source 1..22: mol_type = other RNA
tattgcacttgttccggcctgt

SEQ ID NO: 65197 - RNA, 22 nt, Synthetic Construct
  source 1..22: mol_type = other RNA
tattgcatttgtcccggcctgt

SEQ ID NO: 65198 - RNA, 22 nt, Synthetic Construct
  source 1..22: mol_type = other RNA
tattgcgcttgtcccggcctgt

SEQ ID NO: 65199 - RNA, 22 nt, Synthetic Construct
  source 1..22: mol_type = other RNA
tattgtacttgtcccggcctgt

SEQ ID NO: 65200 - RNA, 22 nt, Synthetic Construct
  source 1..22: mol_type = other RNA
tgttgcacttgtcccggcctgt

SEQ ID NO: 65201 - RNA, 20 nt, Synthetic Construct
  source 1..20: mol_type = other RNA
acctgtactgagctgccccg

SEQ ID NO: 65202 - RNA, 21 nt, Synthetic Construct
  source 1..21: mol_type = other RNA
acctgtactgagctgccccga

SEQ ID NO: 65203 - RNA, 22 nt, Synthetic Construct
  source 1..22: mol_type = other RNA
acctgtactgagctgccccgag

SEQ ID NO: 65204 - RNA, 23 nt, Synthetic Construct
  source 1..23: mol_type = other RNA
acctgtactgagctgccccgaga

SEQ ID NO: 65205 - RNA, 23 nt, Synthetic Construct
  source 1..23: mol_type = other RNA
acctgtactgagctgccccgagt

SEQ ID NO: 65206 - RNA, 21 nt, Synthetic Construct
  source 1..21: mol_type = other RNA
ccctgtactgagctgccccga

SEQ ID NO: 65207 - RNA, 22 nt, Synthetic Construct
  source 1..22: mol_type = other RNA
ccctgtactgagctgccccgag

SEQ ID NO: 65208 - RNA, 23 nt, Synthetic Construct
  source 1..23: mol_type = other RNA
ccctgtactgagctgccccgaga

SEQ ID NO: 65209 - RNA, 23 nt, Synthetic Construct
  source 1..23: mol_type = other RNA
ccctgtactgagctgccccgagt

SEQ ID NO: 65210 - RNA, 21 nt, Synthetic Construct
  source 1..21: mol_type = other RNA
gcctgtactgagctgccccga

SEQ ID NO: 65211 - RNA, 22 nt, Synthetic Construct
  source 1..22: mol_type = other RNA
gcctgtactgagctgccccgag

SEQ ID NO: 65212 - RNA, 23 nt, Synthetic Construct
  source 1..23: mol_type = other RNA
gcctgtactgagctgccccgaga

SEQ ID NO: 65213 - RNA, 23 nt, Synthetic Construct
  source 1..23: mol_type = other RNA
gcctgtactgagctgccccgagt

SEQ ID NO: 65214 - RNA, 22 nt, Synthetic Construct
  source 1..22: mol_type = other RNA
tactgtactgagctgccccgag

SEQ ID NO: 65215 - RNA, 21 nt, Synthetic Construct
  source 1..21: mol_type = other RNA
tcatgtactgagctgccccga

SEQ ID NO: 65216 - RNA, 23 nt, Synthetic Construct
  source 1..23: mol_type = other RNA
tcatgtactgagctgccccgaga

SEQ ID NO: 65217 - RNA, 21 nt, Synthetic Construct
  source 1..21: mol_type = other RNA
tccagtactgagctgccccga

SEQ ID NO: 65218 - RNA, 22 nt, Synthetic Construct
  source 1..22: mol_type = other RNA
tccagtactgagctgccccgag

SEQ ID NO: 65219 - RNA, 23 nt, Synthetic Construct
  source 1..23: mol_type = other RNA
tccagtactgagctgccccgaga

SEQ ID NO: 65220 - RNA, 23 nt, Synthetic Construct
  source 1..23: mol_type = other RNA
tccagtactgagctgccccgagt

SEQ ID NO: 65221 - RNA, 21 nt, Synthetic Construct
  source 1..21: mol_type = other RNA
tcccgtactgagctgccccga

SEQ ID NO: 65222 - RNA, 22 nt, Synthetic Construct
  source 1..22: mol_type = other RNA
tcccgtactgagctgccccgag

SEQ ID NO: 65223 - RNA, 23 nt, Synthetic Construct
  source 1..23: mol_type = other RNA
tcccgtactgagctgccccgaga

SEQ ID NO: 65224 - RNA, 23 nt, Synthetic Construct
  source 1..23: mol_type = other RNA
tcccgtactgagctgccccgagt

SEQ ID NO: 65225 - RNA, 21 nt, Synthetic Construct
  source 1..21: mol_type = other RNA
tcctatactgagctgccccga

SEQ ID NO: 65226 - RNA, 22 nt, Synthetic Construct
  source 1..22: mol_type = other RNA
tcctatactgagctgccccgag

SEQ ID NO: 65227 - RNA, 23 nt, Synthetic Construct
  source 1..23: mol_type = other RNA
tcctatactgagctgccccgaga

SEQ ID NO: 65228 - RNA, 21 nt, Synthetic Construct
  source 1..21: mol_type = other RNA
tcctgaactgagctgccccga

SEQ ID NO: 65229 - RNA, 22 nt, Synthetic Construct
  source 1..22: mol_type = other RNA
tcctgaactgagctgccccgag

SEQ ID NO: 65230 - RNA, 23 nt, Synthetic Construct
  source 1..23: mol_type = other RNA
tcctgaactgagctgccccgaga

SEQ ID NO: 65231 - RNA, 23 nt, Synthetic Construct
  source 1..23: mol_type = other RNA
tcctgaactgagctgccccgagt

SEQ ID NO: 65232 - RNA, 21 nt, Synthetic Construct
  source 1..21: mol_type = other RNA
tcctgcactgagctgccccga

SEQ ID NO: 65233 - RNA, 22 nt, Synthetic Construct
  source 1..22: mol_type = other RNA
tcctgcactgagctgccccgag

SEQ ID NO: 65234 - RNA, 23 nt, Synthetic Construct
  source 1..23: mol_type = other RNA
tcctgcactgagctgccccgaga

SEQ ID NO: 65235 - RNA, 23 nt, Synthetic Construct
  source 1..23: mol_type = other RNA
tcctgcactgagctgccccgagt

SEQ ID NO: 65236 - RNA, 22 nt, Synthetic Construct
  source 1..22: mol_type = other RNA
tcctgtaatgagctgccccgag

SEQ ID NO: 65237 - RNA, 21 nt, Synthetic Construct
  source 1..21: mol_type = other RNA
tcctgtacagagctgccccga

SEQ ID NO: 65238 - RNA, 22 nt, Synthetic Construct
  source 1..22: mol_type = other RNA
tcctgtacagagctgccccgag

SEQ ID NO: 65239 - RNA, 23 nt, Synthetic Construct
  source 1..23: mol_type = other RNA
tcctgtacagagctgccccgaga

SEQ ID NO: 65240 - RNA, 21 nt, Synthetic Construct
  source 1..21: mol_type = other RNA
tcctgtaccgagctgccccga

SEQ ID NO: 65241 - RNA, 22 nt, Synthetic Construct
  source 1..22: mol_type = other RNA
tcctgtaccgagctgccccgag

SEQ ID NO: 65242 - RNA, 23 nt, Synthetic Construct
  source 1..23: mol_type = other RNA
tcctgtaccgagctgccccgaga

SEQ ID NO: 65243 - RNA, 23 nt, Synthetic Construct
  source 1..23: mol_type = other RNA
tcctgtaccgagctgccccgagt

SEQ ID NO: 65244 - RNA, 22 nt, Synthetic Construct
  source 1..22: mol_type = other RNA
tcctgtactaagctgccccgag

SEQ ID NO: 65245 - RNA, 22 nt, Synthetic Construct
  source 1..22: mol_type = other RNA
tcctgtactgaactgccccgag

SEQ ID NO: 65246 - RNA, 22 nt, Synthetic Construct
  source 1..22: mol_type = other RNA
tcctgtactgagcagccccgag

SEQ ID NO: 65247 - RNA, 21 nt, Synthetic Construct
  source 1..21: mol_type = other RNA
tcctgtactgagccgccccga

SEQ ID NO: 65248 - RNA, 22 nt, Synthetic Construct
  source 1..22: mol_type = other RNA
tcctgtactgagccgccccgag

SEQ ID NO: 65249 - RNA, 23 nt, Synthetic Construct
  source 1..23: mol_type = other RNA
tcctgtactgagccgccccgaga

SEQ ID NO: 65250 - RNA, 23 nt, Synthetic Construct
  source 1..23: mol_type = other RNA
tcctgtactgagccgccccgagt

SEQ ID NO: 65251 - RNA, 21 nt, Synthetic Construct
  source 1..21: mol_type = other RNA
tcctgtactgagctaccccga

SEQ ID NO: 65252 - RNA, 22 nt, Synthetic Construct
  source 1..22: mol_type = other RNA
tcctgtactgagctaccccgag

SEQ ID NO: 65253 - RNA, 23 nt, Synthetic Construct
  source 1..23: mol_type = other RNA
tcctgtactgagctaccccgaga

SEQ ID NO: 65254 - RNA, 22 nt, Synthetic Construct
  source 1..22: mol_type = other RNA
tcctgtactgagctgacccgag

SEQ ID NO: 65255 - RNA, 23 nt, Synthetic Construct
  source 1..23: mol_type = other RNA
tcctgtactgagctgacccgaga

SEQ ID NO: 65256 - RNA, 21 nt, Synthetic Construct
  source 1..21: mol_type = other RNA
tcctgtactgagctgcaccga

SEQ ID NO: 65257 - RNA, 23 nt, Synthetic Construct
  source 1..23: mol_type = other RNA
tcctgtactgagctgcaccgaga

SEQ ID NO: 65258 - RNA, 21 nt, Synthetic Construct
  source 1..21: mol_type = other RNA
tcctgtactgagctgccacga

SEQ ID NO: 65259 - RNA, 23 nt, Synthetic Construct
  source 1..23: mol_type = other RNA
tcctgtactgagctgccacgaga

SEQ ID NO: 65260 - RNA, 23 nt, Synthetic Construct
  source 1..23: mol_type = other RNA
tcctgtactgagctgccacgagt

SEQ ID NO: 65261 - RNA, 21 nt, Synthetic Construct
  source 1..21: mol_type = other RNA
tcctgtactgagctgcccaga

SEQ ID NO: 65262 - RNA, 23 nt, Synthetic Construct
  source 1..23: mol_type = other RNA
tcctgtactgagctgcccagaga

SEQ ID NO: 65263 - RNA, 23 nt, Synthetic Construct
  source 1..23: mol_type = other RNA
tcctgtactgagctgcccagagt

SEQ ID NO: 65264 - RNA, 22 nt, Synthetic Construct
  source 1..22: mol_type = other RNA
tcctgtactgagctgccccaag

SEQ ID NO: 65265 - RNA, 23 nt, Synthetic Construct
  source 1..23: mol_type = other RNA
tcctgtactgagctgccccgaat

SEQ ID NO: 65266 - RNA, 24 nt, Synthetic Construct
  source 1..24: mol_type = other RNA
tcctgtactgagctgccccgagat

SEQ ID NO: 65267 - RNA, 24 nt, Synthetic Construct
  source 1..24: mol_type = other RNA
tcctgtactgagctgccccgagta

SEQ ID NO: 65268 - RNA, 23 nt, Synthetic Construct
  source 1..23: mol_type = other RNA
tcctgtactgagctgccccggga

SEQ ID NO: 65269 - RNA, 23 nt, Synthetic Construct
  source 1..23: mol_type = other RNA
tcctgtactgagctgccccgggt

SEQ ID NO: 65270 - RNA, 22 nt, Synthetic Construct
  source 1..22: mol_type = other RNA
tcctgtactgagctgccccgtg

SEQ ID NO: 65271 - RNA, 21 nt, Synthetic Construct
  source 1..21: mol_type = other RNA
tcctgtactgagctgcccgag

SEQ ID NO: 65272 - RNA, 21 nt, Synthetic Construct
  source 1..21: mol_type = other RNA
tcctgtactgagctgccctga

SEQ ID NO: 65273 - RNA, 22 nt, Synthetic Construct
  source 1..22: mol_type = other RNA
tcctgtactgagctgccctgag

SEQ ID NO: 65274 - RNA, 23 nt, Synthetic Construct
  source 1..23: mol_type = other RNA
tcctgtactgagctgccctgaga

SEQ ID NO: 65275 - RNA, 23 nt, Synthetic Construct
  source 1..23: mol_type = other RNA
tcctgtactgagctgccctgagt

SEQ ID NO: 65276 - RNA, 23 nt, Synthetic Construct
  source 1..23: mol_type = other RNA
tcctgtactgagctgcctcgaga

SEQ ID NO: 65277 - RNA, 21 nt, Synthetic Construct
  source 1..21: mol_type = other RNA
tcctgtactgagctgctccga

SEQ ID NO: 65278 - RNA, 22 nt, Synthetic Construct
  source 1..22: mol_type = other RNA
tcctgtactgagctgctccgag

SEQ ID NO: 65279 - RNA, 23 nt, Synthetic Construct
  source 1..23: mol_type = other RNA
tcctgtactgagctgctccgaga

SEQ ID NO: 65280 - RNA, 22 nt, Synthetic Construct
  source 1..22: mol_type = other RNA
tcctgtactgagctgtcccgag

SEQ ID NO: 65281 - RNA, 23 nt, Synthetic Construct
  source 1..23: mol_type = other RNA
tcctgtactgagctgtcccgaga

SEQ ID NO: 65282 - RNA, 21 nt, Synthetic Construct
  source 1..21: mol_type = other RNA
tcctgtactgagttgccccga

SEQ ID NO: 65283 - RNA, 22 nt, Synthetic Construct
  source 1..22: mol_type = other RNA
tcctgtactgagttgccccgag

SEQ ID NO: 65284 - RNA, 23 nt, Synthetic Construct
  source 1..23: mol_type = other RNA
tcctgtactgagttgccccgaga

SEQ ID NO: 65285 - RNA, 21 nt, Synthetic Construct
  source 1..21: mol_type = other RNA
tcctgtactgggctgccccga

SEQ ID NO: 65286 - RNA, 22 nt, Synthetic Construct
  source 1..22: mol_type = other RNA
tcctgtactgggctgccccgag

SEQ ID NO: 65287 - RNA, 23 nt, Synthetic Construct
  source 1..23: mol_type = other RNA
tcctgtactgggctgccccgaga

SEQ ID NO: 65288 - RNA, 23 nt, Synthetic Construct
  source 1..23: mol_type = other RNA
tcctgtactgggctgccccgagt

SEQ ID NO: 65289 - RNA, 22 nt, Synthetic Construct
  source 1..22: mol_type = other RNA
tcctgtactgtgctgccccgag

SEQ ID NO: 65290 - RNA, 22 nt, Synthetic Construct
  source 1..22: mol_type = other RNA
tcctgtattgagctgccccgag

SEQ ID NO: 65291 - RNA, 21 nt, Synthetic Construct
  source 1..21: mol_type = other RNA
tcctgtgctgagctgccccga

SEQ ID NO: 65292 - RNA, 22 nt, Synthetic Construct
  source 1..22: mol_type = other RNA
tcctgtgctgagctgccccgag

SEQ ID NO: 65293 - RNA, 23 nt, Synthetic Construct
  source 1..23: mol_type = other RNA
tcctgtgctgagctgccccgaga

SEQ ID NO: 65294 - RNA, 23 nt, Synthetic Construct
  source 1..23: mol_type = other RNA
tcctgtgctgagctgccccgagt

SEQ ID NO: 65295 - RNA, 22 nt, Synthetic Construct
  source 1..22: mol_type = other RNA
tcttgtactgagctgccccgag

SEQ ID NO: 65296 - RNA, 21 nt, Synthetic Construct
  source 1..21: mol_type = other RNA
ttctgtactgagctgccccga

SEQ ID NO: 65297 - RNA, 22 nt, Synthetic Construct
  source 1..22: mol_type = other RNA
ttctgtactgagctgccccgag

SEQ ID NO: 65298 - RNA, 22 nt, Synthetic Construct
  source 1..22: mol_type = other RNA
gcgtaccgtgagtaataatgcg

SEQ ID NO: 65299 - RNA, 22 nt, Synthetic Construct
  source 1..22: mol_type = other RNA
tagtaccgtgagtaataatgcg

SEQ ID NO: 65300 - RNA, 22 nt, Synthetic Construct
  source 1..22: mol_type = other RNA
tcataccgtgagtaataatgcg

SEQ ID NO: 65301 - RNA, 22 nt, Synthetic Construct
  source 1..22: mol_type = other RNA
tcgaaccgtgagtaataatgcg

SEQ ID NO: 65302 - RNA, 22 nt, Synthetic Construct
  source 1..22: mol_type = other RNA
tcgcaccgtgagtaataatgcg

SEQ ID NO: 65303 - RNA, 22 nt, Synthetic Construct
  source 1..22: mol_type = other RNA
tcgtaacgtgagtaataatgcg

SEQ ID NO: 65304 - RNA, 22 nt, Synthetic Construct
  source 1..22: mol_type = other RNA
tcgtacagtgagtaataatgcg

SEQ ID NO: 65305 - RNA, 22 nt, Synthetic Construct
  source 1..22: mol_type = other RNA
tcgtaccatgagtaataatgcg

SEQ ID NO: 65306 - RNA, 22 nt, Synthetic Construct
  source 1..22: mol_type = other RNA
tcgtaccgagagtaataatgcg

SEQ ID NO: 65307 - RNA, 22 nt, Synthetic Construct
  source 1..22: mol_type = other RNA
tcgtaccgcgagtaataatgcg

SEQ ID NO: 65308 - RNA, 22 nt, Synthetic Construct
  source 1..22: mol_type = other RNA
tcgtaccgggagtaataatgcg

SEQ ID NO: 65309 - RNA, 22 nt, Synthetic Construct
  source 1..22: mol_type = other RNA
tcgtaccgtaagtaataatgcg

SEQ ID NO: 65310 - RNA, 22 nt, Synthetic Construct
  source 1..22: mol_type = other RNA
tcgtaccgtgagaaataatgcg

SEQ ID NO: 65311 - RNA, 22 nt, Synthetic Construct
  source 1..22: mol_type = other RNA
tcgtaccgtgagcaataatgcg

SEQ ID NO: 65312 - RNA, 22 nt, Synthetic Construct
  source 1..22: mol_type = other RNA
tcgtaccgtgaggaataatgcg

SEQ ID NO: 65313 - RNA, 22 nt, Synthetic Construct
  source 1..22: mol_type = other RNA
tcgtaccgtgagtaacaatgcg

SEQ ID NO: 65314 - RNA, 22 nt, Synthetic Construct
  source 1..22: mol_type = other RNA
tcgtaccgtgagtaataaagcg

SEQ ID NO: 65315 - RNA, 22 nt, Synthetic Construct
  source 1..22: mol_type = other RNA
tcgtaccgtgagtaataacgcg

SEQ ID NO: 65316 - RNA, 22 nt, Synthetic Construct
  source 1..22: mol_type = other RNA
tcgtaccgtgagtaataatacg

SEQ ID NO: 65317 - RNA, 22 nt, Synthetic Construct
  source 1..22: mol_type = other RNA
tcgtaccgtgagtaataatgag

SEQ ID NO: 65318 - RNA, 22 nt, Synthetic Construct
  source 1..22: mol_type = other RNA
tcgtaccgtgagtaataatgtg

SEQ ID NO: 65319 - RNA, 22 nt, Synthetic Construct
  source 1..22: mol_type = other RNA
tcgtaccgtgagtaatagtgcg

SEQ ID NO: 65320 - RNA, 22 nt, Synthetic Construct
  source 1..22: mol_type = other RNA
tcgtaccgtgagtaatgatgcg

SEQ ID NO: 65321 - RNA, 22 nt, Synthetic Construct
  source 1..22: mol_type = other RNA
tcgtaccgtgagtagtaatgcg

SEQ ID NO: 65322 - RNA, 22 nt, Synthetic Construct
  source 1..22: mol_type = other RNA
tcgtaccgtgagtgataatgcg

SEQ ID NO: 65323 - RNA, 22 nt, Synthetic Construct
  source 1..22: mol_type = other RNA
tcgtaccgtgggtaataatgcg

SEQ ID NO: 65324 - RNA, 22 nt, Synthetic Construct
  source 1..22: mol_type = other RNA
tcgtactgtgagtaataatgcg

SEQ ID NO: 65325 - RNA, 22 nt, Synthetic Construct
  source 1..22: mol_type = other RNA
tcgtatcgtgagtaataatgcg

SEQ ID NO: 65326 - RNA, 22 nt, Synthetic Construct
  source 1..22: mol_type = other RNA
tcgtgccgtgagtaataatgcg

SEQ ID NO: 65327 - RNA, 23 nt, Synthetic Construct
  source 1..23: mol_type = other RNA
caaagtgctgttcgtgcaggtag

SEQ ID NO: 65328 - RNA, 23 nt, Synthetic Construct
  source 1..23: mol_type = other RNA
caacggaatcccaaaagcagctg

SEQ ID NO: 65329 - RNA, 22 nt, Synthetic Construct
  source 1..22: mol_type = other RNA
cattgcacttgtctcggtctga

SEQ ID NO: 65330 - RNA, 22 nt, Synthetic Construct
  source 1..22: mol_type = other RNA
tagcagcacgtaaatattggcg

SEQ ID NO: 65331 - RNA, 22 nt, Synthetic Construct
  source 1..22: mol_type = other RNA
tattgcacttgtcccggcctgt

SEQ ID NO: 65332 - RNA, 22 nt, Synthetic Construct
  source 1..22: mol_type = other RNA
tcctgtactgagctgccccgag

SEQ ID NO: 65333 - RNA, 22 nt, Synthetic Construct
  source 1..22: mol_type = other RNA
tcgtaccgtgagtaataatgcg

SEQ ID NO: 65334 - RNA, 19 nt, Synthetic Construct
  source 1..19: mol_type = other RNA
aacagtcaggatgttggct

SEQ ID NO: 65335 - RNA, 36 nt, Synthetic Construct; identical to SEQ ID NO: 2248
  source 1..36: mol_type = other RNA

SEQ ID NO: 65336 - RNA, 18 nt, Synthetic Construct
  source 1..18: mol_type = other RNA
aagcggtggatgatgtgg

SEQ ID NO: 65337 - RNA, 37 nt, Synthetic Construct; identical to SEQ ID NO: 2211
  source 1..37: mol_type = other RNA

SEQ ID NO: 65338 - RNA, 17 nt, Synthetic Construct
  source 1..17: mol_type = other RNA
aagttgaccgcctgggg

SEQ ID NO: 65339 - RNA, 37 nt, Synthetic Construct; identical to SEQ ID NO: 4277
  source 1..37: mol_type = other RNA

SEQ ID NO: 65340 - RNA, 21 nt, Synthetic Construct
  source 1..21: mol_type = other RNA
acacatgcaagtcgaacggta

SEQ ID NO: 65341 - RNA, 19 nt, Synthetic Construct
  source 1..19: mol_type = other RNA
acatgcaagtcgaacggta

SEQ ID NO: 65342 - RNA, 17 nt, Synthetic Construct
  source 1..17: mol_type = other RNA
accaaggggtcgtgggt

SEQ ID NO: 65343 - RNA, 18 nt, Synthetic Construct
  source 1..18: mol_type = other RNA
accaaggggtcgtgggtt

SEQ ID NO: 65344 - RNA, 19 nt, Synthetic Construct
  source 1..19: mol_type = other RNA
accaaggggtcgtgggttc

SEQ ID NO: 65345 - RNA, 36 nt, Synthetic Construct; identical to SEQ ID NO: 2506
  source 1..36: mol_type = other RNA

SEQ ID NO: 65346 - RNA, 35 nt, Synthetic Construct; identical to SEQ ID NO: 2069
  source 1..35: mol_type = other RNA

SEQ ID NO: 65347 - RNA, 20 nt, Synthetic Construct
  source 1..20: mol_type = other RNA
acccttgtcattagttgcta

SEQ ID NO: 65348 - RNA, 16 nt, Synthetic Construct
  source 1..16: mol_type = other RNA
accgcttttgtcaggg

SEQ ID NO: 65349 - RNA, 17 nt, Synthetic Construct
  source 1..17: mol_type = other RNA
accggaggaaggtgggg

SEQ ID NO: 65350 - RNA, 18 nt, Synthetic Construct
  source 1..18: mol_type = other RNA
accggaggaaggtgggga

SEQ ID NO: 65351 - RNA, 31 nt, Synthetic Construct; identical to SEQ ID NO: 2412
  source 1..31: mol_type = other RNA

SEQ ID NO: 65352 - RNA, 16 nt, Synthetic Construct
  source 1..16: mol_type = other RNA
acggcccagactccta

SEQ ID NO: 65353 - RNA, 20 nt, Synthetic Construct
  source 1..20: mol_type = other RNA
actgatcgagtcgtcctgcg

SEQ ID NO: 65354 - RNA, 27 nt, Synthetic Construct
  source 1..27: mol_type = other RNA
agagcagctaataccgcatacgacctg

SEQ ID NO: 65355 - RNA, 21 nt, Synthetic Construct
  source 1..21: mol_type = other RNA
agccatcatttaaagaaagcg

SEQ ID NO: 65356 - RNA, 19 nt, Synthetic Construct
  source 1..19: mol_type = other RNA
agcgaaattccttgtcggg

SEQ ID NO: 65357 - RNA, 17 nt, Synthetic Construct
  source 1..17: mol_type = other RNA
agcggtggatgatgtgg

SEQ ID NO: 65358 - RNA, 21 nt, Synthetic Construct
  source 1..21: mol_type = other RNA
agcgtgcttgactgcgagact

SEQ ID NO: 65359 - RNA, 25 nt, Synthetic Construct
  source 1..25: mol_type = other RNA
agctcactgatcgagtcgtcctgcg

SEQ ID NO: 65360 - RNA, 19 nt, Synthetic Construct
  source 1..19: mol_type = other RNA
aggacagtgaaacgagtca

SEQ ID NO: 65361 - RNA, 32 nt, Synthetic Construct; identical to SEQ ID NO: 2296
  source 1..32: mol_type = other RNA

SEQ ID NO: 65362 - RNA, 16 nt, Synthetic Construct
  source 1..16: mol_type = other RNA
aggtcatcgtcaggct

SEQ ID NO: 65363 - RNA, 36 nt, Synthetic Construct; identical to SEQ ID NO: 2456
  source 1..36: mol_type = other RNA

SEQ ID NO: 65364 - RNA, 19 nt, Synthetic Construct
  source 1..19: mol_type = other RNA
agtaggtcatcgtcaggct

SEQ ID NO: 65365 - RNA, 17 nt, Synthetic Construct
  source 1..17: mol_type = other RNA
agtccggatcgtagtct

SEQ ID NO: 65366 - RNA, 19 nt, Synthetic Construct
  source 1..19: mol_type = other RNA
agtcgacgtatagggtgtg

SEQ ID NO: 65367 - RNA, 44 nt, Synthetic Construct; identical to SEQ ID NO: 5536
  source 1..44: mol_type = other RNA

SEQ ID NO: 65368 - RNA, 16 nt, Synthetic Construct
  source 1..16: mol_type = other RNA
agttgaccgcctgggg

SEQ ID NO: 65369 - RNA, 27 nt, Synthetic Construct
  source 1..27: mol_type = other RNA
atagtctttgttcgattccgttgagta

SEQ ID NO: 65370 - RNA, 23 nt, Synthetic Construct
  source 1..23: mol_type = other RNA
atatcggaacgtgcccagtcgtg

SEQ ID NO: 65371 - RNA, 38 nt, Synthetic Construct; identical to SEQ ID NO: 11817
  source 1..38: mol_type = other RNA

SEQ ID NO: 65372 - RNA, 18 nt, Synthetic Construct
  source 1..18: mol_type = other RNA
atcgctagtaatcgcgga

SEQ ID NO: 65373 - RNA, 21 nt, Synthetic Construct
  source 1..21: mol_type = other RNA
atcggaacgtgcccagtcgtg

SEQ ID NO: 65374 - RNA, 36 nt, Synthetic Construct; identical to SEQ ID NO: 2660
  source 1..36: mol_type = other RNA

SEQ ID NO: 65375 - RNA, 17 nt, Synthetic Construct
  source 1..17: mol_type = other RNA
atcgtgacgatagtgca

SEQ ID NO: 65376 - RNA, 16 nt, Synthetic Construct
  source 1..16: mol_type = other RNA
atgcaagtcgaacggt

SEQ ID NO: 65377 - RNA, 17 nt, Synthetic Construct
  source 1..17: mol_type = other RNA
atgcaagtcgaacggta

SEQ ID NO: 65378 - RNA, 18 nt, Synthetic Construct
  source 1..18: mol_type = other RNA
atggccgggacagagggc

SEQ ID NO: 65379 - RNA, 19 nt, Synthetic Construct
  source 1..19: mol_type = other RNA
caagcggtggatgatgtgg

SEQ ID NO: 65380 - RNA, 20 nt, Synthetic Construct
  source 1..20: mol_type = other RNA
caatggccgggacagagggc

SEQ ID NO: 65381 - RNA, 21 nt, Synthetic Construct
  source 1..21: mol_type = other RNA
caatggccgggacagagggct

SEQ ID NO: 65382 - RNA, 19 nt, Synthetic Construct
  source 1..19: mol_type = other RNA
cacatgcaagtcgaacggt

SEQ ID NO: 65383 - RNA, 20 nt, Synthetic Construct
  source 1..20: mol_type = other RNA
cacatgcaagtcgaacggta

SEQ ID NO: 65384 - RNA, 17 nt, Synthetic Construct
  source 1..17: mol_type = other RNA
cacggcccagactccta

SEQ ID NO: 65385 - RNA, 21 nt, Synthetic Construct
  source 1..21: mol_type = other RNA
cacgtcatacaatggccggga

SEQ ID NO: 65386 - RNA, 21 nt, Synthetic Construct
  source 1..21: mol_type = other RNA
cactgatcgagtcgtcctgcg

SEQ ID NO: 65387 - RNA, 17 nt, Synthetic Construct
  source 1..17: mol_type = other RNA
cagagacgagtcgacca

SEQ ID NO: 65388 - RNA, 19 nt, Synthetic Construct
  source 1..19: mol_type = other RNA
cagcactctgcaaagacga

SEQ ID NO: 65389 - RNA, 20 nt, Synthetic Construct
  source 1..20: mol_type = other RNA
caggacagtgaaacgagtca

SEQ ID NO: 65390 - RNA, 17 nt, Synthetic Construct
  source 1..17: mol_type = other RNA
cagtagctcgaggaaaa

SEQ ID NO: 65391 - RNA, 17 nt, Synthetic Construct
  source 1..17: mol_type = other RNA
catgcaagtcgaacggt

SEQ ID NO: 65392 - RNA, 18 nt, Synthetic Construct
  source 1..18: mol_type = other RNA
catgcaagtcgaacggta

SEQ ID NO: 65393 - RNA, 16 nt, Synthetic Construct
  source 1..16: mol_type = other RNA
ccaaggggtcgtgggt

SEQ ID NO: 65394 - RNA, 17 nt, Synthetic Construct
  source 1..17: mol_type = other RNA
ccaaggggtcgtgggtt

SEQ ID NO: 65395 - RNA, 18 nt, Synthetic Construct
  source 1..18: mol_type = other RNA
ccaaggggtcgtgggttc

SEQ ID NO: 65396 - RNA, 35 nt, Synthetic Construct; identical to SEQ ID NO: 2269
  source 1..35: mol_type = other RNA

SEQ ID NO: 65397 - RNA, 17 nt, Synthetic Construct
  source 1..17: mol_type = other RNA
ccagtaaacggcggccg

SEQ ID NO: 65398 - RNA, 18 nt, Synthetic Construct
  source 1..18: mol_type = other RNA
ccagtaaacggcggccgt

SEQ ID NO: 65399 - RNA, 19 nt, Synthetic Construct
  source 1..19: mol_type = other RNA
ccagtaaacggcggccgta

SEQ ID NO: 65400 - RNA, 16 nt, Synthetic Construct
  source 1..16: mol_type = other RNA
ccatgccgcgtgcggg

SEQ ID NO: 65401 - RNA, 16 nt, Synthetic Construct
  source 1..16: mol_type = other RNA
cccaaaggtcgtcggt

SEQ ID NO: 65402 - RNA, 18 nt, Synthetic Construct
  source 1..18: mol_type = other RNA
cccaaaggtcgtcggttc

SEQ ID NO: 65403 - RNA, 34 nt, Synthetic Construct; identical to SEQ ID NO: 2183
  source 1..34: mol_type = other RNA

SEQ ID NO: 65404 - RNA, 16 nt, Synthetic Construct
  source 1..16: mol_type = other RNA
cccagaaacccggtcg

SEQ ID NO: 65405 - RNA, 20 nt, Synthetic Construct
  source 1..20: mol_type = other RNA
cccagtaaacggcggccgta

SEQ ID NO: 65406 - RNA, 16 nt, Synthetic Construct
  source 1..16: mol_type = other RNA
cccctggacctgtact

SEQ ID NO: 65407 - RNA, 17 nt, Synthetic Construct
  source 1..17: mol_type = other RNA
cccctggacctgtactg

SEQ ID NO: 65408 - RNA, 30 nt, Synthetic Construct; identical to SEQ ID NO: 2353
  source 1..30: mol_type = other RNA

SEQ ID NO: 65409 - RNA, 31 nt, Synthetic Construct; identical to SEQ ID NO: 2310
  source 1..31: mol_type = other RNA

SEQ ID NO: 65410 - RNA, 33 nt, Synthetic Construct; identical to SEQ ID NO: 2638
  source 1..33: mol_type = other RNA

SEQ ID NO: 65411 - RNA, 29 nt, Synthetic Construct
  source 1..29: mol_type = other RNA
cccgtgtgaaagtaggtcatcgtcaggct

SEQ ID NO: 65412 - RNA, 19 nt, Synthetic Construct
  source 1..19: mol_type = other RNA
cccttgtcattagttgcta

SEQ ID NO: 65413 - RNA, 20 nt, Synthetic Construct
  source 1..20: mol_type = other RNA
ccgcagagtacagcttggga

SEQ ID NO: 65414 - RNA, 16 nt, Synthetic Construct
  source 1..16: mol_type = other RNA
ccgcttttgtcaggga

SEQ ID NO: 65415 - RNA, 36 nt, Synthetic Construct; identical to SEQ ID NO: 11035
  source 1..36: mol_type = other RNA

SEQ ID NO: 65416 - RNA, 30 nt, Synthetic Construct; identical to SEQ ID NO: 2840
  source 1..30: mol_type = other RNA

SEQ ID NO: 65417 - RNA, 37 nt, Synthetic Construct; identical to SEQ ID NO: 2365
  source 1..37: mol_type = other RNA

SEQ ID NO: 65418 - RNA, 22 nt, Synthetic Construct
  source 1..22: mol_type = other RNA
ccggtcccaagggtatggctgt

SEQ ID NO: 65419 - RNA, 32 nt, Synthetic Construct; identical to SEQ ID NO: 3713
  source 1..32: mol_type = other RNA

SEQ ID NO: 65420 - RNA, 17 nt, Synthetic Construct
  source 1..17: mol_type = other RNA
ccgtgtgaaagtaggtc

SEQ ID NO: 65421 - RNA, 27 nt, Synthetic Construct
  source 1..27: mol_type = other RNA
ccgtgtgaaagtaggtcatcgtcaggc

SEQ ID NO: 65422 - RNA, 28 nt, Synthetic Construct
  source 1..28: mol_type = other RNA
ccgtgtgaaagtaggtcatcgtcaggct

SEQ ID NO: 65423 - RNA, 30 nt, Synthetic Construct; identical to SEQ ID NO: 2578
  source 1..30: mol_type = other RNA

SEQ ID NO: 65424 - RNA, 31 nt, Synthetic Construct; identical to SEQ ID NO: 2333
  source 1..31: mol_type = other RNA

SEQ ID NO: 65425 - RNA, 17 nt, Synthetic Construct
  source 1..17: mol_type = other RNA
cctcgcgcgattggagc

SEQ ID NO: 65426 - RNA, 18 nt, Synthetic Construct
  source 1..18: mol_type = other RNA
cctcgcgcgattggagcg

SEQ ID NO: 65427 - RNA, 22 nt, Synthetic Construct
  source 1..22: mol_type = other RNA
cctcgcgcgattggagcggccg

SEQ ID NO: 65428 - RNA, 23 nt, Synthetic Construct
  source 1..23: mol_type = other RNA
cctcgcgcgattggagcggccga

SEQ ID NO: 65429 - RNA, 25 nt, Synthetic Construct
  source 1..25: mol_type = other RNA
cctcgcgcgattggagcggccgata

SEQ ID NO: 65430 - RNA, 18 nt, Synthetic Construct
  source 1..18: mol_type = other RNA
cctgaagaataagcaccg

SEQ ID NO: 65431 - RNA, 18 nt, Synthetic Construct
  source 1..18: mol_type = other RNA
cctgtaccgatcaatagt

SEQ ID NO: 65432 - RNA, 19 nt, Synthetic Construct
  source 1..19: mol_type = other RNA
cctgtaccgatcaatagtg

SEQ ID NO: 65433 - RNA, 19 nt, Synthetic Construct
  source 1..19: mol_type = other RNA
cctgtctgaatatgggggg

SEQ ID NO: 65434 - RNA, 17 nt, Synthetic Construct
  source 1..17: mol_type = other RNA
cgaaattccttgtcggg

SEQ ID NO: 65435 - RNA, 43 nt, Synthetic Construct; identical to SEQ ID NO: 2315
  source 1..43: mol_type = other RNA

SEQ ID NO: 65436 - RNA, 36 nt, Synthetic Construct; identical to SEQ ID NO: 2469
  source 1..36: mol_type = other RNA

SEQ ID NO: 65437 - RNA, 17 nt, Synthetic Construct
  source 1..17: mol_type = other RNA
cgatctgtagctggtct

SEQ ID NO: 65438 - RNA, 18 nt, Synthetic Construct
  source 1..18: mol_type = other RNA
cgccgatgatagtgcgga

SEQ ID NO: 65439 - RNA, 36 nt, Synthetic Construct; identical to SEQ ID NO: 2546
  source 1..36: mol_type = other RNA

SEQ ID NO: 65440 - RNA, 34 nt, Synthetic Construct; identical to SEQ ID NO: 2265
  source 1..34: mol_type = other RNA

SEQ ID NO: 65441 - RNA, 16 nt, Synthetic Construct
  source 1..16: mol_type = other RNA
cgctagtaatcgcgga

SEQ ID NO: 65442 - RNA, 23 nt, Synthetic Construct
  source 1..23: mol_type = other RNA
cgctcacggaaagagaatgaagc

SEQ ID NO: 65443 - RNA, 22 nt, Synthetic Construct
  source 1..22: mol_type = other RNA
cggaatcgctagtaatcgcgga

SEQ ID NO: 65444 - RNA, 24 nt, Synthetic Construct
  source 1..24: mol_type = other RNA
cggagaaggttagctcagccaact

SEQ ID NO: 65445 - RNA, 22 nt, Synthetic Construct
  source 1..22: mol_type = other RNA
cggaggagttcgaaggtacgct

SEQ ID NO: 65446 - RNA, 36 nt, Synthetic Construct; identical to SEQ ID NO: 2520
  source 1..36: mol_type = other RNA

SEQ ID NO: 65447 - RNA, 36 nt, Synthetic Construct; identical to SEQ ID NO: 2344
  source 1..36: mol_type = other RNA

SEQ ID NO: 65448 - RNA, 29 nt, Synthetic Construct
  source 1..29: mol_type = other RNA
cgggatggggacagtgtatggtgggcagt

SEQ ID NO: 65449 - RNA, 34 nt, Synthetic Construct; identical to SEQ ID NO: 2291
  source 1..34: mol_type = other RNA

SEQ ID NO: 65450 - RNA, 33 nt, Synthetic Construct; identical to SEQ ID NO: 2556
  source 1..33: mol_type = other RNA

SEQ ID NO: 65451 - RNA, 32 nt, Synthetic Construct; identical to SEQ ID NO: 2582
  source 1..32: mol_type = other RNA

SEQ ID NO: 65452 - RNA, 34 nt, Synthetic Construct; identical to SEQ ID NO: 2298
  source 1..34: mol_type = other RNA

SEQ ID NO: 65453 - RNA, 21 nt, Synthetic Construct
  source 1..21: mol_type = other RNA
cggtcccaagggtatggctgt

SEQ ID NO: 65454 - RNA, 34 nt, Synthetic Construct; identical to SEQ ID NO: 2553
  source 1..34: mol_type = other RNA

SEQ ID NO: 65455 - RNA, 27 nt, Synthetic Construct
  source 1..27: mol_type = other RNA
cgtgtgaaagtaggtcatcgtcaggct

SEQ ID NO: 65456 - RNA, 21 nt, Synthetic Construct
  source 1..21: mol_type = other RNA
ctaatcccagaaacccggtcg

SEQ ID NO: 65457 - RNA, 17 nt, Synthetic Construct
  source 1..17: mol_type = other RNA
ctaatgagactgccggt

SEQ ID NO: 65458 - RNA, 18 nt, Synthetic Construct
  source 1..18: mol_type = other RNA
ctaatgagactgccggtg

SEQ ID NO: 65459 - RNA, 23 nt, Synthetic Construct
  source 1..23: mol_type = other RNA
ctcactgatcgagtcgtcctgcg

SEQ ID NO: 65460 - RNA, 24 nt, Synthetic Construct
  source 1..24: mol_type = other RNA
ctcactgatcgagtcgtcctgcgc

SEQ ID NO: 65461 - RNA, 16 nt, Synthetic Construct
  source 1..16: mol_type = other RNA
ctcagtagctcgagga

SEQ ID NO: 65462 - RNA, 20 nt, Synthetic Construct
  source 1..20: mol_type = other RNA
ctctaatgagactgccggtg

SEQ ID NO: 65463 - RNA, 16 nt, Synthetic Construct
  source 1..16: mol_type = other RNA
ctgacgctcatgcacg

SEQ ID NO: 65464 - RNA, 19 nt, Synthetic Construct
  source 1..19: mol_type = other RNA
ctgatcgagtcgtcctgcg

SEQ ID NO: 65465 - RNA, 21 nt, Synthetic Construct
  source 1..21: mol_type = other RNA
ctttgttcgattccgttgagt

SEQ ID NO: 65466 - RNA, 22 nt, Synthetic Construct
  source 1..22: mol_type = other RNA
ctttgttcgattccgttgagta

SEQ ID NO: 65467 - RNA, 16 nt, Synthetic Construct
  source 1..16: mol_type = other RNA
gaaattccttgtcggg

SEQ ID NO: 65468 - RNA, 17 nt, Synthetic Construct
  source 1..17: mol_type = other RNA
gaagttgaccgcctggg

SEQ ID NO: 65469 - RNA, 18 nt, Synthetic Construct
  source 1..18: mol_type = other RNA
gaagttgaccgcctgggg

SEQ ID NO: 65470 - RNA, 20 nt, Synthetic Construct
  source 1..20: mol_type = other RNA
gaatcgctagtaatcgcgga

SEQ ID NO: 65471 - RNA, 35 nt, Synthetic Construct; identical to SEQ ID NO: 3369
  source 1..35: mol_type = other RNA

SEQ ID NO: 65472 - RNA, 26 nt, Synthetic Construct
  source 1..26: mol_type = other RNA
gacttaccaaacctatgcaaactccg

SEQ ID NO: 65473 - RNA, 27 nt, Synthetic Construct
  source 1..27: mol_type = other RNA
gacttaccaaacctatgcaaactccga

SEQ ID NO: 65474 - RNA, 37 nt, Synthetic Construct; identical to SEQ ID NO: 5125
  source 1..37: mol_type = other RNA

SEQ ID NO: 65475 - RNA, 22 nt, Synthetic Construct
  source 1..22: mol_type = other RNA
gagagcctggacacaggtgctg

SEQ ID NO: 65476 - RNA, 36 nt, Synthetic Construct; identical to SEQ ID NO: 2366
  source 1..36: mol_type = other RNA

SEQ ID NO: 65477 - RNA, 43 nt, Synthetic Construct; identical to SEQ ID NO: 6202
  source 1..43: mol_type = other RNA

SEQ ID NO: 65478 - RNA, 26 nt, Synthetic Construct
  source 1..26: mol_type = other RNA
gagcagctaataccgcatacgacctg

SEQ ID NO: 65479 - RNA, 16 nt, Synthetic Construct
  source 1..16: mol_type = other RNA
gagctgtggatagggg

SEQ ID NO: 65480 - RNA, 31 nt, Synthetic Construct; identical to SEQ ID NO: 5506
  source 1..31: mol_type = other RNA

SEQ ID NO: 65481 - RNA, 16 nt, Synthetic Construct
  source 1..16: mol_type = other RNA
gatctgtagctggtct

SEQ ID NO: 65482 - RNA, 24 nt, Synthetic Construct
  source 1..24: mol_type = other RNA
gatgaggcgtgataacgagtctgc

SEQ ID NO: 65483 - RNA, 26 nt, Synthetic Construct
  source 1..26: mol_type = other RNA
gatgcgtggtaggagagcgttctgta

SEQ ID NO: 65484 - RNA, 16 nt, Synthetic Construct
  source 1..16: mol_type = other RNA
gatttgggagtgctcg

SEQ ID NO: 65485 - RNA, 35 nt, Synthetic Construct; identical to SEQ ID NO: 2402
  source 1..35: mol_type = other RNA

SEQ ID NO: 65486 - RNA, 22 nt, Synthetic Construct
  source 1..22: mol_type = other RNA
gcactctaatgagactgccggt

SEQ ID NO: 65487 - RNA, 16 nt, Synthetic Construct
  source 1..16: mol_type = other RNA
gcagacgaagtgagtg

SEQ ID NO: 65488 - RNA, 24 nt, Synthetic Construct
  source 1..24: mol_type = other RNA
gcagctaataccgcatacgacctg

SEQ ID NO: 65489 - RNA, 35 nt, Synthetic Construct; identical to SEQ ID NO: 2505
  source 1..35: mol_type = other RNA

SEQ ID NO: 65490 - RNA, 26 nt, Synthetic Construct
  source 1..26: mol_type = other RNA
gcataagcgtgcttgactgcgagact

SEQ ID NO: 65491 - RNA, 33 nt, Synthetic Construct; identical to SEQ ID NO: 2386
  source 1..33: mol_type = other RNA

SEQ ID NO: 65492 - RNA, 20 nt, Synthetic Construct
  source 1..20: mol_type = other RNA
gccatcatttaaagaaagcg

SEQ ID NO: 65493 - RNA, 17 nt, Synthetic Construct
  source 1..17: mol_type = other RNA
gccatgccgcgtgcggg

SEQ ID NO: 65494 - RNA, 27 nt, Synthetic Construct
  source 1..27: mol_type = other RNA
gcccaggtggcggaattggtagacgca

SEQ ID NO: 65495 - RNA, 33 nt, Synthetic Construct; identical to SEQ ID NO: 2395
  source 1..33: mol_type = other RNA

SEQ ID NO: 65496 - RNA, 31 nt, Synthetic Construct; identical to SEQ ID NO: 2423
  source 1..31: mol_type = other RNA

SEQ ID NO: 65497 - RNA, 35 nt, Synthetic Construct; identical to SEQ ID NO: 2514
  source 1..35: mol_type = other RNA

SEQ ID NO: 65498 - RNA, 38 nt, Synthetic Construct; identical to SEQ ID NO: 2492
  source 1..38: mol_type = other RNA

SEQ ID NO: 65499 - RNA, 18 nt, Synthetic Construct
  source 1..18: mol_type = other RNA
gcgaaattccttgtcggg

SEQ ID NO: 65500 - RNA, 19 nt, Synthetic Construct
  source 1..19: mol_type = other RNA
gcgaaattccttgtcgggt

SEQ ID NO: 65501 - RNA, 18 nt, Synthetic Construct
  source 1..18: mol_type = other RNA
gcgccgatgatagtgcgg

SEQ ID NO: 65502 - RNA, 19 nt, Synthetic Construct
  source 1..19: mol_type = other RNA
gcgccgatgatagtgcgga

SEQ ID NO: 65503 - RNA, 17 nt, Synthetic Construct
  source 1..17: mol_type = other RNA
gcggctgtagctcagtt

SEQ ID NO: 65504 - RNA, 32 nt, Synthetic Construct; identical to SEQ ID NO: 2086
  source 1..32: mol_type = other RNA

SEQ ID NO: 65505 - RNA, 33 nt, Synthetic Construct; identical to SEQ ID NO: 1982
  source 1..33: mol_type = other RNA

SEQ ID NO: 65506 - RNA, 34 nt, Synthetic Construct; identical to SEQ ID NO: 2317
  source 1..34: mol_type = other RNA

SEQ ID NO: 65507 - RNA, 30 nt, Synthetic Construct; identical to SEQ ID NO: 2407
  source 1..30: mol_type = other RNA

SEQ ID NO: 65508 - RNA, 31 nt, Synthetic Construct; identical to SEQ ID NO: 2263
  source 1..31: mol_type = other RNA

SEQ ID NO: 65509 - RNA, 30 nt, Synthetic Construct; identical to SEQ ID NO: 2274
  source 1..30: mol_type = other RNA

SEQ ID NO: 65510 - RNA, 31 nt, Synthetic Construct; identical to SEQ ID NO: 2758
  source 1..31: mol_type = other RNA

SEQ ID NO: 65511 - RNA, 32 nt, Synthetic Construct; identical to SEQ ID NO: 2850
  source 1..32: mol_type = other RNA

SEQ ID NO: 65512 - RNA, 34 nt, Synthetic Construct; identical to SEQ ID NO: 2529
  source 1..34: mol_type = other RNA

SEQ ID NO: 65513 - RNA, 31 nt, Synthetic Construct; identical to SEQ ID NO: 2893
  source 1..31: mol_type = other RNA

SEQ ID NO: 65514 - RNA, 33 nt, Synthetic Construct; identical to SEQ ID NO: 2126
  source 1..33: mol_type = other RNA

SEQ ID NO: 65515 - RNA, 31 nt, Synthetic Construct; identical to SEQ ID NO: 2507
  source 1..31: mol_type = other RNA

SEQ ID NO: 65516 - RNA, 32 nt, Synthetic Construct; identical to SEQ ID NO: 2435
  source 1..32: mol_type = other RNA

SEQ ID NO: 65517 - RNA, 34 nt, Synthetic Construct; identical to SEQ ID NO: 2375
  source 1..34: mol_type = other RNA

SEQ ID NO: 65518 - RNA, 22 nt, Synthetic Construct
  source 1..22: mol_type = other RNA
gcgggtgtagttcaatggtaga

SEQ ID NO: 65519 - RNA, 16 nt, Synthetic Construct
  source 1..16: mol_type = other RNA
gcggtggatgatgtgg

SEQ ID NO: 65520 - RNA, 16 nt, Synthetic Construct
  source 1..16: mol_type = other RNA
gcgtagatatgcggag

SEQ ID NO: 65521 - RNA, 17 nt, Synthetic Construct
  source 1..17: mol_type = other RNA
gcgtagatatgcggagg

SEQ ID NO: 65522 - RNA, 20 nt, Synthetic Construct
  source 1..20: mol_type = other RNA
gcgtgcttgactgcgagact

SEQ ID NO: 65523 - RNA, 23 nt, Synthetic Construct
  source 1..23: mol_type = other RNA
gcgtggtaggagagcgttctgta

SEQ ID NO: 65524 - RNA, 22 nt, Synthetic Construct
  source 1..22: mol_type = other RNA
gcgttgcaaccagtgccggggg

SEQ ID NO: 65525 - RNA, 16 nt, Synthetic Construct
  source 1..16: mol_type = other RNA
gctattgacgaccgta

SEQ ID NO: 65526 - RNA, 18 nt, Synthetic Construct
  source 1..18: mol_type = other RNA
gctattgacgaccgtacc

SEQ ID NO: 65527 - RNA, 19 nt, Synthetic Construct
  source 1..19: mol_type = other RNA
gctattgacgaccgtaccg

SEQ ID NO: 65528 - RNA, 20 nt, Synthetic Construct
  source 1..20: mol_type = other RNA
gctattgacgaccgtaccgc

SEQ ID NO: 65529 - RNA, 21 nt, Synthetic Construct
  source 1..21: mol_type = other RNA
gctattgacgaccgtaccgca

SEQ ID NO: 65530 - RNA, 22 nt, Synthetic Construct
  source 1..22: mol_type = other RNA
gctcacggaaagagaatgaagc

SEQ ID NO: 65531 - RNA, 24 nt, Synthetic Construct
  source 1..24: mol_type = other RNA
gctcactgatcgagtcgtcctgcg

SEQ ID NO: 65532 - RNA, 22 nt, Synthetic Construct
  source 1..22: mol_type = other RNA
gctcttgactgaagtcccagta

SEQ ID NO: 65533 - RNA, 35 nt, Synthetic Construct; identical to SEQ ID NO: 2452
  source 1..35: mol_type = other RNA

SEQ ID NO: 65534 - RNA, 27 nt, Synthetic Construct
  source 1..27: mol_type = other RNA
gctttacattggactttgaacagatct

SEQ ID NO: 65535 - RNA, 28 nt, Synthetic Construct
  source 1..28: mol_type = other RNA
gctttacattggactttgaacagatctg

SEQ ID NO: 65536 - RNA, 21 nt, Synthetic Construct
  source 1..21: mol_type = other RNA
gctttgatccggagatttccg

SEQ ID NO: 65537 - RNA, 28 nt, Synthetic Construct
  source 1..28: mol_type = other RNA
gctttgatccggagatttccgaatgggg

SEQ ID NO: 65538 - RNA, 21 nt, Synthetic Construct
  source 1..21: mol_type = other RNA
ggaatcgctagtaatcgcgga

SEQ ID NO: 65539 - RNA, 18 nt, Synthetic Construct
  source 1..18: mol_type = other RNA
ggacgttgataggctggg

SEQ ID NO: 65540 - RNA, 21 nt, Synthetic Construct
  source 1..21: mol_type = other RNA
ggaggagttcgaaggtacgct

SEQ ID NO: 65541 - RNA, 22 nt, Synthetic Construct
  source 1..22: mol_type = other RNA
ggaggagttcgaaggtacgcta

SEQ ID NO: 65542 - RNA, 35 nt, Synthetic Construct; identical to SEQ ID NO: 2615
  source 1..35: mol_type = other RNA

SEQ ID NO: 65543 - RNA, 33 nt, Synthetic Construct; identical to SEQ ID NO: 10232
  source 1..33: mol_type = other RNA

SEQ ID NO: 65544 - RNA, 35 nt, Synthetic Construct; identical to SEQ ID NO: 2399
  source 1..35: mol_type = other RNA

SEQ ID NO: 65545 - RNA, 22 nt, Synthetic Construct
  source 1..22: mol_type = other RNA
ggcagggttcgtgactggggtg

SEQ ID NO: 65546 - RNA, 23 nt, Synthetic Construct
  source 1..23: mol_type = other RNA
ggcagggttcgtgactggggtga

SEQ ID NO: 65547 - RNA, 28 nt, Synthetic Construct
  source 1..28: mol_type = other RNA
ggcagggttcgtgactggggtgaagtcg

SEQ ID NO: 65548 - RNA, 17 nt, Synthetic Construct
  source 1..17: mol_type = other RNA
ggcccttatgggtaggg

SEQ ID NO: 65549 - RNA, 16 nt, Synthetic Construct
  source 1..16: mol_type = other RNA
ggccgtcgtcagctcg

SEQ ID NO: 65550 - RNA, 18 nt, Synthetic Construct
  source 1..18: mol_type = other RNA
ggccgtcgtcagctcgtg

SEQ ID NO: 65551 - RNA, 30 nt, Synthetic Construct; identical to SEQ ID NO: 3933
  source 1..30: mol_type = other RNA

SEQ ID NO: 65552 - RNA, 32 nt, Synthetic Construct; identical to SEQ ID NO: 4710
  source 1..32: mol_type = other RNA

SEQ ID NO: 65553 - RNA, 26 nt, Synthetic Construct
  source 1..26: mol_type = other RNA
ggcgcttgagagaactctggagaagg

SEQ ID NO: 65554 - RNA, 32 nt, Synthetic Construct; identical to SEQ ID NO: 2798
  source 1..32: mol_type = other RNA

SEQ ID NO: 65555 - RNA, 33 nt, Synthetic Construct; identical to SEQ ID NO: 2479
  source 1..33: mol_type = other RNA

SEQ ID NO: 65556 - RNA, 16 nt, Synthetic Construct
  source 1..16: mol_type = other RNA
ggcgggggtcgctggt

SEQ ID NO: 65557 - RNA, 35 nt, Synthetic Construct; identical to SEQ ID NO: 2762
  source 1..35: mol_type = other RNA

SEQ ID NO: 65558 - RNA, 23 nt, Synthetic Construct
  source 1..23: mol_type = other RNA
ggcggttatgcaagacagaggtg

SEQ ID NO: 65559 - RNA, 18 nt, Synthetic Construct
  source 1..18: mol_type = other RNA
ggctttgaagtaaggtcg

SEQ ID NO: 65560 - RNA, 31 nt, Synthetic Construct; identical to SEQ ID NO: 2427
  source 1..31: mol_type = other RNA

SEQ ID NO: 65561 - RNA, 32 nt, Synthetic Construct; identical to SEQ ID NO: 4279
  source 1..32: mol_type = other RNA

SEQ ID NO: 65562 - RNA, 30 nt, Synthetic Construct; identical to SEQ ID NO: 2308
  source 1..30: mol_type = other RNA

SEQ ID NO: 65563 - RNA, 31 nt, Synthetic Construct; identical to SEQ ID NO: 2442
  source 1..31: mol_type = other RNA

SEQ ID NO: 65564 - RNA, 32 nt, Synthetic Construct; identical to SEQ ID NO: 3541
  source 1..32: mol_type = other RNA

SEQ ID NO: 65565 - RNA, 33 nt, Synthetic Construct; identical to SEQ ID NO: 3082
  source 1..33: mol_type = other RNA

SEQ ID NO: 65566 - RNA, 27 nt, Synthetic Construct
  source 1..27: mol_type = other RNA
ggggagctaatcccagaaacccggtcg

SEQ ID NO: 65567 - RNA, 31 nt, Synthetic Construct; identical to SEQ ID NO: 2293
  source 1..31: mol_type = other RNA

SEQ ID NO: 65568 - RNA, 17 nt, Synthetic Construct
  source 1..17: mol_type = other RNA
gggtctgtagctcagtc

SEQ ID NO: 65569 - RNA, 30 nt, Synthetic Construct; identical to SEQ ID NO: 1958
  source 1..30: mol_type = other RNA

SEQ ID NO: 65570 - RNA, 31 nt, Synthetic Construct; identical to SEQ ID NO: 2215
  source 1..31: mol_type = other RNA

SEQ ID NO: 65571 - RNA, 32 nt, Synthetic Construct; identical to SEQ ID NO: 2318
  source 1..32: mol_type = other RNA

SEQ ID NO: 65572 - RNA, 33 nt, Synthetic Construct; identical to SEQ ID NO: 2253
  source 1..33: mol_type = other RNA

SEQ ID NO: 65573 - RNA, 34 nt, Synthetic Construct; identical to SEQ ID NO: 2186
  source 1..34: mol_type = other RNA

SEQ ID NO: 65574 - RNA, 19 nt, Synthetic Construct
  source 1..19: mol_type = other RNA
gggtgcaagcgttaatcgg

SEQ ID NO: 65575 - RNA, 24 nt, Synthetic Construct
  source 1..24: mol_type = other RNA
gggttgtaaaccgcttttgtcagg

SEQ ID NO: 65576 - RNA, 25 nt, Synthetic Construct
  source 1..25: mol_type = other RNA
gggttgtaaaccgcttttgtcaggg

SEQ ID NO: 65577 - RNA, 22 nt, Synthetic Construct
  source 1..22: mol_type = other RNA
ggtagcgaaattccttgtcggg

SEQ ID NO: 65578 - RNA, 23 nt, Synthetic Construct
  source 1..23: mol_type = other RNA
ggtagcgaaattccttgtcgggt

SEQ ID NO: 65579 - RNA, 16 nt, Synthetic Construct
  source 1..16: mol_type = other RNA
ggtagctcgttgggct

SEQ ID NO: 65580 - RNA, 20 nt, Synthetic Construct
  source 1..20: mol_type = other RNA
ggtcccaagggtatggctgt

SEQ ID NO: 65581 - RNA, 18 nt, Synthetic Construct
  source 1..18: mol_type = other RNA
ggtgcaagcgttaatcgg

SEQ ID NO: 65582 - RNA, 26 nt, Synthetic Construct
  source 1..26: mol_type = other RNA
ggtggctgtagctcagttggtagagt

SEQ ID NO: 65583 - RNA, 28 nt, Synthetic Construct
  source 1..28: mol_type = other RNA
ggtggctgtagctcagttggtagagtcc

SEQ ID NO: 65584 - RNA, 32 nt, Synthetic Construct; identical to SEQ ID NO: 3092
  source 1..32: mol_type = other RNA

SEQ ID NO: 65585 - RNA, 36 nt, Synthetic Construct; identical to SEQ ID NO: 10333
  source 1..36: mol_type = other RNA

SEQ ID NO: 65586 - RNA, 16 nt, Synthetic Construct
  source 1..16: mol_type = other RNA
ggtgggggtcgttggt

SEQ ID NO: 65587 - RNA, 35 nt, Synthetic Construct; identical to SEQ ID NO: 2567
  source 1..35: mol_type = other RNA

SEQ ID NO: 65588 - RNA, 24 nt, Synthetic Construct
  source 1..24: mol_type = other RNA
ggttgtaaaccgcttttgtcaggg

SEQ ID NO: 65589 - RNA, 19 nt, Synthetic Construct
  source 1..19: mol_type = other RNA
gtactgacgctcatgcacg

SEQ ID NO: 65590 - RNA, 21 nt, Synthetic Construct
  source 1..21: mol_type = other RNA
gtagcgaaattccttgtcggg

SEQ ID NO: 65591 - RNA, 18 nt, Synthetic Construct
  source 1..18: mol_type = other RNA
gtaggtcatcgtcaggct

SEQ ID NO: 65592 - RNA, 16 nt, Synthetic Construct
  source 1..16: mol_type = other RNA
gtccccttcgtctaga

SEQ ID NO: 65593 - RNA, 18 nt, Synthetic Construct
  source 1..18: mol_type = other RNA
gtccccttcgtctagagg

SEQ ID NO: 65594 - RNA, 16 nt, Synthetic Construct
  source 1..16: mol_type = other RNA
gtccggatcgtagtct

SEQ ID NO: 65595 - RNA, 17 nt, Synthetic Construct
  source 1..17: mol_type = other RNA
gtccggatcgtagtctg

SEQ ID NO: 65596 - RNA, 18 nt, Synthetic Construct
  source 1..18: mol_type = other RNA
gtccggatcgtagtctgc

SEQ ID NO: 65597 - RNA, 19 nt, Synthetic Construct
  source 1..19: mol_type = other RNA
gtccggatcgtagtctgca

SEQ ID NO: 65598 - RNA, 16 nt, Synthetic Construct
  source 1..16: mol_type = other RNA
gtcgacgtatagggtg

SEQ ID NO: 65599 - RNA, 17 nt, Synthetic Construct
  source 1..17: mol_type = other RNA
gtcgacgtatagggtgt

SEQ ID NO: 65600 - RNA, 18 nt, Synthetic Construct
  source 1..18: mol_type = other RNA
gtcgacgtatagggtgtg

SEQ ID NO: 65601 - RNA, 23 nt, Synthetic Construct
  source 1..23: mol_type = other RNA
gtctttgttcgattccgttgagt

SEQ ID NO: 65602 - RNA, 24 nt, Synthetic Construct
  source 1..24: mol_type = other RNA
gtctttgttcgattccgttgagta

SEQ ID NO: 65603 - RNA, 24 nt, Synthetic Construct
  source 1..24: mol_type = other RNA
gtgaaagtaggtcatcgtcaggct

SEQ ID NO: 65604 - RNA, 28 nt, Synthetic Construct
  source 1..28: mol_type = other RNA
gtggcattgccgagtagctaagtgcgga

SEQ ID NO: 65605 - RNA, 32 nt, Synthetic Construct; identical to SEQ ID NO: 4734
  source 1..32: mol_type = other RNA

SEQ ID NO: 65606 - RNA, 21 nt, Synthetic Construct
  source 1..21: mol_type = other RNA
gtgggcgtttgaagtgaagtg

SEQ ID NO: 65607 - RNA, 26 nt, Synthetic Construct
  source 1..26: mol_type = other RNA
gtgtgaaagtaggtcatcgtcaggct

SEQ ID NO: 65608 - RNA, 21 nt, Synthetic Construct
  source 1..21: mol_type = other RNA
gttggttcaagcgtgtagtcg

SEQ ID NO: 65609 - RNA, 27 nt, Synthetic Construct
  source 1..27: mol_type = other RNA
gttggttcaagcgtgtagtcgtgctct

SEQ ID NO: 65610 - RNA, 20 nt, Synthetic Construct
  source 1..20: mol_type = other RNA
tagcgaaattccttgtcggg

SEQ ID NO: 65611 - RNA, 17 nt, Synthetic Construct
  source 1..17: mol_type = other RNA
taggtcatcgtcaggct

SEQ ID NO: 65612 - RNA, 24 nt, Synthetic Construct
  source 1..24: mol_type = other RNA
tatatcggaacgtgcccagtcgtg

SEQ ID NO: 65613 - RNA, 39 nt, Synthetic Construct; identical to SEQ ID NO: 10211
  source 1..39: mol_type = other RNA

SEQ ID NO: 65614 - RNA, 22 nt, Synthetic Construct
  source 1..22: mol_type = other RNA
tatcggaacgtgcccagtcgtg

SEQ ID NO: 65615 - RNA, 37 nt, Synthetic Construct; identical to SEQ ID NO: 2607
  source 1..37: mol_type = other RNA

SEQ ID NO: 65616 - RNA, 22 nt, Synthetic Construct
  source 1..22: mol_type = other RNA
tcactgatcgagtcgtcctgcg

SEQ ID NO: 65617 - RNA, 23 nt, Synthetic Construct
  source 1..23: mol_type = other RNA
tcactgatcgagtcgtcctgcgc

SEQ ID NO: 65618 - RNA, 24 nt, Synthetic Construct
  source 1..24: mol_type = other RNA
tcactgatcgagtcgtcctgcgcg

SEQ ID NO: 65619 - RNA, 22 nt, Synthetic Construct
  source 1..22: mol_type = other RNA
tcagcgccgatgatagtgcgga

SEQ ID NO: 65620 - RNA, 16 nt, Synthetic Construct
  source 1..16: mol_type = other RNA
tcagtagctcgaggaa

SEQ ID NO: 65621 - RNA, 17 nt, Synthetic Construct
  source 1..17: mol_type = other RNA
tcagtagctcgaggaaa

SEQ ID NO: 65622 - RNA, 18 nt, Synthetic Construct
  source 1..18: mol_type = other RNA
tcagtagctcgaggaaaa

SEQ ID NO: 65623 - RNA, 19 nt, Synthetic Construct
  source 1..19: mol_type = other RNA
tcagtagctcgaggaaaag

SEQ ID NO: 65624 - RNA, 20 nt, Synthetic Construct
  source 1..20: mol_type = other RNA
tcagtagctcgaggaaaaga

SEQ ID NO: 65625 - RNA, 22 nt, Synthetic Construct
  source 1..22: mol_type = other RNA
tcagtagctcgaggaaaagaca

SEQ ID NO: 65626 - RNA, 18 nt, Synthetic Construct
  source 1..18: mol_type = other RNA
tcccaagggtatggctgt

SEQ ID NO: 65627 - RNA, 17 nt, Synthetic Construct
  source 1..17: mol_type = other RNA
tcccagaaacccggtcg

SEQ ID NO: 65628 - RNA, 21 nt, Synthetic Construct
  source 1..21: mol_type = other RNA
tcccagtaaacggcggccgta

SEQ ID NO: 65629 - RNA, 17 nt, Synthetic Construct
  source 1..17: mol_type = other RNA
tcccctggacctgtact

SEQ ID NO: 65630 - RNA, 18 nt, Synthetic Construct
  source 1..18: mol_type = other RNA
tcccctggacctgtactg

SEQ ID NO: 65631 - RNA, 31 nt, Synthetic Construct; identical to SEQ ID NO: 2278
  source 1..31: mol_type = other RNA

SEQ ID NO: 65632 - RNA, 41 nt, Synthetic Construct; identical to SEQ ID NO: 2441
  source 1..41: mol_type = other RNA

SEQ ID NO: 65633 - RNA, 30 nt, Synthetic Construct; identical to SEQ ID NO: 1771
  source 1..30: mol_type = other RNA

SEQ ID NO: 65634 - RNA, 16 nt, Synthetic Construct
  source 1..16: mol_type = other RNA
tccgaaccgactagtg

SEQ ID NO: 65635 - RNA, 18 nt, Synthetic Construct
  source 1..18: mol_type = other RNA
tccgacatgcgagggttc

SEQ ID NO: 65636 - RNA, 35 nt, Synthetic Construct; identical to SEQ ID NO: 2397
  source 1..35: mol_type = other RNA

SEQ ID NO: 65637 - RNA, 37 nt, Synthetic Construct; identical to SEQ ID NO: 2482
  source 1..37: mol_type = other RNA

SEQ ID NO: 65638 - RNA, 16 nt, Synthetic Construct
  source 1..16: mol_type = other RNA
tccggatcgtagtctg

SEQ ID NO: 65639 - RNA, 34 nt, Synthetic Construct; identical to SEQ ID NO: 2367
  source 1..34: mol_type = other RNA

SEQ ID NO: 65640 - RNA, 34 nt, Synthetic Construct; identical to SEQ ID NO: 2019
  source 1..34: mol_type = other RNA

SEQ ID NO: 65641 - RNA, 35 nt, Synthetic Construct; identical to SEQ ID NO: 2450
  source 1..35: mol_type = other RNA

SEQ ID NO: 65642 - RNA, 35 nt, Synthetic Construct; identical to SEQ ID NO: 2354
  source 1..35: mol_type = other RNA

SEQ ID NO: 65643 - RNA, 31 nt, Synthetic Construct; identical to SEQ ID NO: 2295
  source 1..31: mol_type = other RNA

SEQ ID NO: 65644 - RNA, 32 nt, Synthetic Construct; identical to SEQ ID NO: 2052
  source 1..32: mol_type = other RNA

SEQ ID NO: 65645 - RNA, 33 nt, Synthetic Construct; identical to SEQ ID NO: 2266
  source 1..33: mol_type = other RNA

SEQ ID NO: 65646 - RNA, 19 nt, Synthetic Construct
  source 1..19: mol_type = other RNA
tcctgtaccgatcaatagt

SEQ ID NO: 65647 - RNA, 20 nt, Synthetic Construct
  source 1..20: mol_type = other RNA
tcctgtaccgatcaatagtg

SEQ ID NO: 65648 - RNA, 20 nt, Synthetic Construct
  source 1..20: mol_type = other RNA
tcctgtctgaatatgggggg

SEQ ID NO: 65649 - RNA, 21 nt, Synthetic Construct
  source 1..21: mol_type = other RNA
tcctgtctgaatatgggggga

SEQ ID NO: 65650 - RNA, 36 nt, Synthetic Construct; identical to SEQ ID NO: 2478
  source 1..36: mol_type = other RNA

SEQ ID NO: 65651 - RNA, 17 nt, Synthetic Construct
  source 1..17: mol_type = other RNA
tcgctagtaatcgcgga

SEQ ID NO: 65652 - RNA, 35 nt, Synthetic Construct; identical to SEQ ID NO: 10694
  source 1..35: mol_type = other RNA

SEQ ID NO: 65653 - RNA, 23 nt, Synthetic Construct
  source 1..23: mol_type = other RNA
tcggaatcgctagtaatcgcgga

SEQ ID NO: 65654 - RNA, 24 nt, Synthetic Construct
  source 1..24: mol_type = other RNA
tcggctcatctcatcctggggctg

SEQ ID NO: 65655 - RNA, 16 nt, Synthetic Construct
  source 1..16: mol_type = other RNA
tcgtgacgatagtgca

SEQ ID NO: 65656 - RNA, 18 nt, Synthetic Construct
  source 1..18: mol_type = other RNA
tctaatgagactgccggt

SEQ ID NO: 65657 - RNA, 19 nt, Synthetic Construct
  source 1..19: mol_type = other RNA
tctaatgagactgccggtg

SEQ ID NO: 65658 - RNA, 22 nt, Synthetic Construct
  source 1..22: mol_type = other RNA
tctttgttcgattccgttgagt

SEQ ID NO: 65659 - RNA, 23 nt, Synthetic Construct
  source 1..23: mol_type = other RNA
tctttgttcgattccgttgagta

SEQ ID NO: 65660 - RNA, 23 nt, Synthetic Construct
  source 1..23: mol_type = other RNA
tgaaagtaggtcatcgtcaggct

SEQ ID NO: 65661 - RNA, 29 nt, Synthetic Construct
  source 1..29: mol_type = other RNA
tgaaggtgggttgtgaagcctgctggagg

SEQ ID NO: 65662 - RNA, 36 nt, Synthetic Construct; identical to SEQ ID NO: 2444
  source 1..36: mol_type = other RNA

SEQ ID NO: 65663 - RNA, 16 nt, Synthetic Construct
  source 1..16: mol_type = other RNA
tgcacgaaagcgtggg

SEQ ID NO: 65664 - RNA, 34 nt, Synthetic Construct; identical to SEQ ID NO: 2364
  source 1..34: mol_type = other RNA

SEQ ID NO: 65665 - RNA, 39 nt, Synthetic Construct; identical to SEQ ID NO: 4400
  source 1..39: mol_type = other RNA

SEQ ID NO: 65666 - RNA, 35 nt, Synthetic Construct; identical to SEQ ID NO: 2548
  source 1..35: mol_type = other RNA

SEQ ID NO: 65667 - RNA, 35 nt, Synthetic Construct; identical to SEQ ID NO: 2518
  source 1..35: mol_type = other RNA

SEQ ID NO: 65668 - RNA, 16 nt, Synthetic Construct
  source 1..16: mol_type = other RNA
tgcgtagatatgcgga

SEQ ID NO: 65669 - RNA, 18 nt, Synthetic Construct
  source 1..18: mol_type = other RNA
tgcgtagatatgcggagg

SEQ ID NO: 65670 - RNA, 17 nt, Synthetic Construct
  source 1..17: mol_type = other RNA
tggccgggacagagggc

SEQ ID NO: 65671 - RNA, 16 nt, Synthetic Construct
  source 1..16: mol_type = other RNA
tggccgtcgtcagctc

SEQ ID NO: 65672 - RNA, 17 nt, Synthetic Construct
  source 1..17: mol_type = other RNA
tggccgtcgtcagctcg

SEQ ID NO: 65673 - RNA, 19 nt, Synthetic Construct
  source 1..19: mol_type = other RNA
tggccgtcgtcagctcgtg

SEQ ID NO: 65674 - RNA, 19 nt, Synthetic Construct
  source 1..19: mol_type = other RNA
tgtcaactggttgttggga

SEQ ID NO: 65675 - RNA, 22 nt, Synthetic Construct
  source 1..22: mol_type = other RNA
tgtcaactggttgttgggaggg

SEQ ID NO: 65676 - RNA, 26 nt, Synthetic Construct
  source 1..26: mol_type = other RNA
tgtcggctcatctcatcctggggctg

SEQ ID NO: 65677 - RNA, 25 nt, Synthetic Construct
  source 1..25: mol_type = other RNA
tgtgaaagtaggtcatcgtcaggct

SEQ ID NO: 65678 - RNA, 22 nt, Synthetic Construct
  source 1..22: mol_type = other RNA
tgttggttcaagcgtgtagtcg

SEQ ID NO: 65679 - RNA, 28 nt, Synthetic Construct
  source 1..28: mol_type = other RNA
tgttggttcaagcgtgtagtcgtgctct

SEQ ID NO: 65680 - RNA, 29 nt, Synthetic Construct
  source 1..29: mol_type = other RNA
ttacaggggttcgaatcccctaggggacg

SEQ ID NO: 65681 - RNA, 31 nt, Synthetic Construct; identical to SEQ ID NO: 1881
  source 1..31: mol_type = other RNA

SEQ ID NO: 65682 - RNA, 37 nt, Synthetic Construct; identical to SEQ ID NO: 2447
  source 1..37: mol_type = other RNA

SEQ ID NO: 65683 - RNA, 18 nt, Synthetic Construct
  source 1..18: mol_type = other RNA
ccgaagctgtgggattga

SEQ ID NO: 65684 - RNA, 22 nt, Synthetic Construct
  source 1..22: mol_type = other RNA
cgcgccgctgtaaaaccactgc

SEQ ID NO: 65685 - RNA, 19 nt, Synthetic Construct
  source 1..19: mol_type = other RNA
gccgaagctgtgggattga

SEQ ID NO: 65686 - RNA, 20 nt, Synthetic Construct
  source 1..20: mol_type = other RNA
tgccgaagctgtgggattga

SEQ ID NO: 65687 - RNA, 21 nt, Synthetic Construct
  source 1..21: mol_type = other RNA
ctgccgaagctgtgggattga

SEQ ID NO: 65688 - RNA, 23 nt, Synthetic Construct
  source 1..23: mol_type = other RNA
atcgaattgtggtctggagaagt

SEQ ID NO: 65689 - RNA, 21 nt, Synthetic Construct
  source 1..21: mol_type = other RNA
tgaatcggtagaggagcgttc

SEQ ID NO: 65690 - RNA, 18 nt, Synthetic Construct
  source 1..18: mol_type = other RNA
aatggtccggtgagaacg

SEQ ID NO: 65691 - RNA, 17 nt, Synthetic Construct
  source 1..17: mol_type = other RNA
actacagtccgacgatc

SEQ ID NO: 65692 - RNA, 24 nt, Synthetic Construct
  source 1..24: mol_type = other RNA
ggggtgtagaataggtgggagctt

SEQ ID NO: 65693 - RNA, 16 nt, Synthetic Construct
  source 1..16: mol_type = other RNA
ctacagtccgacgatc

SEQ ID NO: 65694 - RNA, 26 nt, Synthetic Construct
  source 1..26: mol_type = other RNA
agagcgaggtatgtaggcggtgctac

SEQ ID NO: 65695 - RNA, 22 nt, Synthetic Construct
  source 1..22: mol_type = other RNA
taagcggcagggtcggaacagg

SEQ ID NO: 65696 - RNA, 22 nt, Synthetic Construct
  source 1..22: mol_type = other RNA
taacaggattagcagagcgagg

SEQ ID NO: 65697 - RNA, 16 nt, Synthetic Construct
  source 1..16: mol_type = other RNA
ctgttccgggatttgt

SEQ ID NO: 65698 - RNA, 16 nt, Synthetic Construct
  source 1..16: mol_type = other RNA
gtcaacggccatacca

SEQ ID NO: 65699 - RNA, 34 nt, Synthetic Construct
  source 1..34: mol_type = other RNA
cgtgcgctctcctgttccgaccctgccgcttacc

SEQ ID NO: 65700 - RNA, 16 nt, Synthetic Construct
  source 1..16: mol_type = other RNA
tatcggtaggggagcg

SEQ ID NO: 65701 - RNA, 25 nt, Synthetic Construct
  source 1..25: mol_type = other RNA
ggaggtgtagaataggtgggagctt

SEQ ID NO: 65702 - RNA, 33 nt, Synthetic Construct
  source 1..33: mol_type = other RNA
tctgtgtgaggtacacatggttgagtgtcgtta

SEQ ID NO: 65703 - RNA, 26 nt, Synthetic Construct
  source 1..26: mol_type = other RNA
aggaggtgtagaataggtgggagctt

SEQ ID NO: 65704 - RNA, 23 nt, Synthetic Construct
  source 1..23: mol_type = other RNA
aggtgtagaataggtgggagctt

SEQ ID NO: 65705 - RNA, 23 nt, Synthetic Construct
  source 1..23: mol_type = other RNA
taagcggcagggtcggaacagga

SEQ ID NO: 65706 - RNA, 16 nt, Synthetic Construct
  source 1..16: mol_type = other RNA
tgcggaaggatcattc

SEQ ID NO: 65707 - RNA, 17 nt, Synthetic Construct
  source 1..17: mol_type = other RNA
gggttggactcaagacg

SEQ ID NO: 65708 - RNA, 24 nt, Synthetic Construct
  source 1..24: mol_type = other RNA
caaatgggcggtaggcgtgtacgg

SEQ ID NO: 65709 - RNA, 20 nt, Synthetic Construct
  source 1..20: mol_type = other RNA
tgaatggtccggtgagaacg

SEQ ID NO: 65710 - RNA, 17 nt, Synthetic Construct
  source 1..17: mol_type = other RNA
tctgttccgggatttgt

SEQ ID NO: 65711 - RNA, 31 nt, Synthetic Construct
  source 1..31: mol_type = other RNA
cctgtcgggacccgaaagatggtgaactatg

SEQ ID NO: 65712 - RNA, 36 nt, Synthetic Construct
  source 1..36: mol_type = other RNA
cgtagtcgatggataacgggttaatattcccgtacc

SEQ ID NO: 65713 - RNA, 24 nt, Synthetic Construct
  source 1..24: mol_type = other RNA
atcgaattgtggtctggagaagtc

SEQ ID NO: 65714 - RNA, 32 nt, Synthetic Construct
  source 1..32: mol_type = other RNA
ttgtttgggattgcagctctaagtgggtggta

SEQ ID NO: 65715 - RNA, 29 nt, Synthetic Construct
  source 1..29: mol_type = other RNA
agcgtaattggtaggacccgaaagatggt

SEQ ID NO: 65716 - RNA, 30 nt, Synthetic Construct
  source 1..30: mol_type = other RNA
agcgtaattggtaggacccgaaagatggtg

SEQ ID NO: 65717 - RNA, 23 nt, Synthetic Construct
  source 1..23: mol_type = other RNA
tgcgttatcccctgattctgtgg

SEQ ID NO: 65718 - RNA, 41 nt, Synthetic Construct
  source 1..41: mol_type = other RNA
cagactgagagctctttcttgattctatgggtggtggtgca

SEQ ID NO: 65719 - RNA, 22 nt, Synthetic Construct
  source 1..22: mol_type = other RNA
gacgcgcatgaatggattaatg

SEQ ID NO: 65720 - RNA, 35 nt, Synthetic Construct
  source 1..35: mol_type = other RNA
gtagtcgatggataacgggttaatattcccgtacc

SEQ ID NO: 65721 - RNA, 37 nt, Synthetic Construct
  source 1..37: mol_type = other RNA
gcgtagtcgatggataacgggttaatattcccgtacc

SEQ ID NO: 65722 - RNA, 24 nt, Synthetic Construct
  source 1..24: mol_type = other RNA
gaggtgtagaataggtgggagctt

SEQ ID NO: 65723 - RNA, 19 nt, Synthetic Construct
  source 1..19: mol_type = other RNA
gaggtgtaggataagtggg

SEQ ID NO: 65724 - RNA, 17 nt, Synthetic Construct
  source 1..17: mol_type = other RNA
ctgcggaaggatcattc

SEQ ID NO: 65725 - RNA, 39 nt, Synthetic Construct
  source 1..39: mol_type = other RNA
cagactgagagctctttcttgattctatgggtggtggtg

SEQ ID NO: 65726 - RNA, 18 nt, Synthetic Construct
  source 1..18: mol_type = other RNA
ctacgtccctgccctttg

SEQ ID NO: 65727 - RNA, 20 nt, Synthetic Construct
  source 1..20: mol_type = other RNA
tggtccggtgaagtgttcgg

SEQ ID NO: 65728 - RNA, 21 nt, Synthetic Construct
  source 1..21: mol_type = other RNA
acgcgcatgaatggattaatg

SEQ ID NO: 65729 - RNA, 24 nt, Synthetic Construct
  source 1..24: mol_type = other RNA
tgttaagtggaaaaggatgtgggg

SEQ ID NO: 65730 - RNA, 20 nt, Synthetic Construct
  source 1..20: mol_type = other RNA
gaactggtacggacaagggg

SEQ ID NO: 65731 - RNA, 26 nt, Synthetic Construct
  source 1..26: mol_type = other RNA
gttccggggggagtatggtcgcaagg

SEQ ID NO: 65732 - RNA, 17 nt, Synthetic Construct
  source 1..17: mol_type = other RNA
acagtcgggggcattcg

SEQ ID NO: 65733 - RNA, 25 nt, Synthetic Construct
  source 1..25: mol_type = other RNA
cgttgataggtcaggtgtggaagcg

SEQ ID NO: 65734 - RNA, 21 nt, Synthetic Construct
  source 1..21: mol_type = other RNA
atcgaagacgatcagataccg

SEQ ID NO: 65735 - RNA, 26 nt, Synthetic Construct
  source 1..26: mol_type = other RNA
gcggccgtcggtgcggatcttggtgg

SEQ ID NO: 65736 - RNA, 27 nt, Synthetic Construct
  source 1..27: mol_type = other RNA
gcggccgtcggtgcggatcttggtggt

SEQ ID NO: 65737 - RNA, 25 nt, Synthetic Construct
  source 1..25: mol_type = other RNA
ttccggggggagtatggtcgcaagg

SEQ ID NO: 65738 - RNA, 23 nt, Synthetic Construct
  source 1..23: mol_type = other RNA
gaggtgtagaataggtgggagct

SEQ ID NO: 65739 - RNA, 29 nt, Synthetic Construct
  source 1..29: mol_type = other RNA
gctcgcgttgactacgtccctgccctttg

SEQ ID NO: 65740 - RNA, 17 nt, Synthetic Construct
  source 1..17: mol_type = other RNA
cgcagagtcgggttgtt

SEQ ID NO: 65741 - RNA, 17 nt, Synthetic Construct
  source 1..17: mol_type = other RNA
cagaactggcgatgagg

SEQ ID NO: 65742 - RNA, 16 nt, Synthetic Construct
  source 1..16: mol_type = other RNA
cagtcgggggcattcg

SEQ ID NO: 65743 - RNA, 22 nt, Synthetic Construct
  source 1..22: mol_type = other RNA
cgttggccttcgggatcggagt

SEQ ID NO: 65744 - RNA, 17 nt, Synthetic Construct
  source 1..17: mol_type = other RNA
ggtgtaggataagtggg

SEQ ID NO: 65745 - RNA, 19 nt, Synthetic Construct
  source 1..19: mol_type = other RNA
tgtggttctattttgttgg

SEQ ID NO: 65746 - RNA, 19 nt, Synthetic Construct
  source 1..19: mol_type = other RNA
ccgtgttcggaagattttc

SEQ ID NO: 65747 - RNA, 21 nt, Synthetic Construct
  source 1..21: mol_type = other RNA
gcccgtgttcggaagattttc

SEQ ID NO: 65748 - RNA, 36 nt, Synthetic Construct; identical to SEQ ID NO: 3596
  source 1..36: mol_type = other RNA

SEQ ID NO: 65749 - RNA, 31 nt, Synthetic Construct
  source 1..31: mol_type = other RNA
cgggcaagagcatgtctggctcagcgtcggt

SEQ ID NO: 65750 - RNA, 29 nt, Synthetic Construct
  source 1..29: mol_type = other RNA
gatgcgaaagcaggtcaaagtgatccggc

SEQ ID NO: 65751 - RNA, 20 nt, Synthetic Construct
  source 1..20: mol_type = other RNA
cccgtgttcggaagattttc

SEQ ID NO: 65752 - RNA, 22 nt, Synthetic Construct
  source 1..22: mol_type = other RNA
cgactggtaactgggatgaagt

SEQ ID NO: 65753 - RNA, 31 nt, Synthetic Construct; identical to SEQ ID NO: 1627
  source 1..31: mol_type = other RNA

SEQ ID NO: 65754 - RNA, 34 nt, Synthetic Construct; identical to SEQ ID NO: 11269
  source 1..34: mol_type = other RNA

SEQ ID NO: 65755 - RNA, 29 nt, Synthetic Construct
  source 1..29: mol_type = other RNA
gtaatggcgggaactctggacagactgcc

SEQ ID NO: 65756 - RNA, 19 nt, Synthetic Construct
  source 1..19: mol_type = other RNA
cttggggttgtaggaccac

SEQ ID NO: 65757 - RNA, 18 nt, Synthetic Construct
  source 1..18: mol_type = other RNA
cacagtgtgaatcggcgc

SEQ ID NO: 65758 - RNA, 17 nt, Synthetic Construct
  source 1..17: mol_type = other RNA
acagtgtgaatcggcgc

SEQ ID NO: 65759 - RNA, 21 nt, Synthetic Construct
  source 1..21: mol_type = other RNA
gactggtaactgggatgaagt

SEQ ID NO: 65760 - RNA, 26 nt, Synthetic Construct
  source 1..26: mol_type = other RNA
gaggaacactagtggcgtaggcgaga

SEQ ID NO: 65761 - RNA, 29 nt, Synthetic Construct
  source 1..29: mol_type = other RNA
cgcggggtggagcagcccggtagctcgtc

SEQ ID NO: 65762 - RNA, 19 nt, Synthetic Construct
  source 1..19: mol_type = other RNA
ccttggggttgtaggacca

SEQ ID NO: 65763 - RNA, 18 nt, Synthetic Construct
  source 1..18: mol_type = other RNA
cgtgttcggaagattttc

SEQ ID NO: 65764 - RNA, 18 nt, Synthetic Construct
  source 1..18: mol_type = other RNA
gcgaaattccttgtcggg

SEQ ID NO: 65765 - RNA, 24 nt, Synthetic Construct
  source 1..24: mol_type = other RNA
gaaagattaaggcaagaggttagc

SEQ ID NO: 65766 - RNA, 31 nt, Synthetic Construct; identical to SEQ ID NO: 6001
  source 1..31: mol_type = other RNA

SEQ ID NO: 65767 - RNA, 37 nt, Synthetic Construct
  source 1..37: mol_type = other RNA
tacctggttgatcctgccagtagcatatgcttgtctt

SEQ ID NO: 65768 - RNA, 16 nt, Synthetic Construct
  source 1..16: mol_type = other RNA
ctgcctcagcgtcggt

SEQ ID NO: 65769 - RNA, 23 nt, Synthetic Construct
  source 1..23: mol_type = other RNA
cagcccgtgttcggaagattttc

SEQ ID NO: 65770 - RNA, 20 nt, Synthetic Construct
  source 1..20: mol_type = other RNA
gtgccgaagctgtgggattg

SEQ ID NO: 65771 - RNA, 20 nt, Synthetic Construct
  source 1..20: mol_type = other RNA
ccttggggttgtaggaccac

SEQ ID NO: 65772 - RNA, 24 nt, Synthetic Construct
  source 1..24: mol_type = other RNA
tcagcccgtgttcggaagattttc

SEQ ID NO: 65773 - RNA, 19 nt, Synthetic Construct
  source 1..19: mol_type = other RNA
tcacagtgtgaatcggcgc

SEQ ID NO: 65774 - RNA, 21 nt, Synthetic Construct
  source 1..21: mol_type = other RNA
gtgccgaagctgtgggattga

SEQ ID NO: 65775 - RNA, 20 nt, Synthetic Construct
  source 1..20: mol_type = other RNA
ctcacagtgtgaatcggcgc

SEQ ID NO: 65776 - RNA, 30 nt, Synthetic Construct; identical to SEQ ID NO: 1194
  source 1..30: mol_type = other RNA

SEQ ID NO: 65777 - RNA, 23 nt, Synthetic Construct
  source 1..23: mol_type = other RNA
gttgaattgtggtctgtggacgt

SEQ ID NO: 65778 - RNA, 19 nt, Synthetic Construct
  source 1..19: mol_type = other RNA
tgtctgcctcagcgtcggt

SEQ ID NO: 65779 - RNA, 35 nt, Synthetic Construct; identical to SEQ ID NO: 14082
  source 1..35: mol_type = other RNA

SEQ ID NO: 65780 - RNA, 20 nt, Synthetic Construct
  source 1..20: mol_type = other RNA
gtaagtgggagacgttgaag

SEQ ID NO: 65781 - RNA, 19 nt, Synthetic Construct
  source 1..19: mol_type = other RNA
cgaagctatgggatttgtt

SEQ ID NO: 65782 - RNA, 24 nt, Synthetic Construct
  source 1..24: mol_type = other RNA
gttgaattgtggtctgtggacgtg

SEQ ID NO: 65783 - RNA, 29 nt, Synthetic Construct
  source 1..29: mol_type = other RNA
gtgcatgcactctggggttgtgggacagc

SEQ ID NO: 65784 - RNA, 18 nt, Synthetic Construct
  source 1..18: mol_type = other RNA
gaagctatgggatttgtt

SEQ ID NO: 65785 - RNA, 16 nt, Synthetic Construct
  source 1..16: mol_type = other RNA
ttaatccagccagtcc

SEQ ID NO: 65786 - RNA, 19 nt, Synthetic Construct
  source 1..19: mol_type = other RNA
caactctcaacaacggata

SEQ ID NO: 65787 - RNA, 21 nt, Synthetic Construct
  source 1..21: mol_type = other RNA
ttcggaagaaggggtgcctgg

SEQ ID NO: 65788 - RNA, 23 nt, Synthetic Construct
  source 1..23: mol_type = other RNA
gcgactggtaactgggatgaagt

SEQ ID NO: 65789 - RNA, 23 nt, Synthetic Construct
  source 1..23: mol_type = other RNA
ttagtgacgcgcatgaatggatt

SEQ ID NO: 65790 - RNA, 18 nt, Synthetic Construct
  source 1..18: mol_type = other RNA
cttggggttgtaggacca

SEQ ID NO: 65791 - RNA, 20 nt, Synthetic Construct
  source 1..20: mol_type = other RNA
tcggaagaaggggtgcctgg

SEQ ID NO: 65792 - RNA, 33 nt, Synthetic Construct; identical to SEQ ID NO: 9568
  source 1..33: mol_type = other RNA

SEQ ID NO: 65793 - RNA, 29 nt, Synthetic Construct
  source 1..29: mol_type = other RNA
ggcaagagcatgtctggctcagcgtcggt

SEQ ID NO: 65794 - RNA, 22 nt, Synthetic Construct
  source 1..22: mol_type = other RNA
ggaggggagtctggaattcacg

SEQ ID NO: 65795 - RNA, 20 nt, Synthetic Construct
  source 1..20: mol_type = other RNA
ttggcctcaagtcaggcagg

SEQ ID NO: 65796 - RNA, 19 nt, Synthetic Construct
  source 1..19: mol_type = other RNA
cggaagaaggggtgcctgg

SEQ ID NO: 65797 - RNA, 42 nt, Synthetic Construct
  source 1..42: mol_type = other RNA
cggtagtcctggcagtaaacggtgcacgcttggtgtgggggg

SEQ ID NO: 65798 - RNA, 29 nt, Synthetic Construct
  source 1..29: mol_type = other RNA
tctcatggagagtttgatcctggctcagg

SEQ ID NO: 65799 - RNA, 27 nt, Synthetic Construct
  source 1..27: mol_type = other RNA
gattcagcccgtgttcggaagattttc

SEQ ID NO: 65800 - RNA, 17 nt, Synthetic Construct
  source 1..17: mol_type = other RNA
aagctatgggatttgtt

SEQ ID NO: 65801 - RNA, 21 nt, Synthetic Construct
  source 1..21: mol_type = other RNA
cgactggtaactgggatgaag

SEQ ID NO: 65802 - RNA, 22 nt, Synthetic Construct
  source 1..22: mol_type = other RNA
acgcctgtctgagcgtcgcttt

SEQ ID NO: 65803 - RNA, 28 nt, Synthetic Construct
  source 1..28: mol_type = other RNA
gtgcatgcactctggggttgtgggacag

SEQ ID NO: 65804 - RNA, 25 nt, Synthetic Construct
  source 1..25: mol_type = other RNA
ggaaagattaaggcaagaggttagc

SEQ ID NO: 65805 - RNA, 18 nt, Synthetic Construct
  source 1..18: mol_type = other RNA
gtctgcctcagcgtcggt

SEQ ID NO: 65806 - RNA, 18 nt, Synthetic Construct
  source 1..18: mol_type = other RNA
cctgcggaaggatcattg

SEQ ID NO: 65807 - RNA, 21 nt, Synthetic Construct
  source 1..21: mol_type = other RNA
gttgaattgtggtctgtggac

SEQ ID NO: 65808 - RNA, 22 nt, Synthetic Construct
  source 1..22: mol_type = other RNA
agctcacagtgtgaatcggcgc

SEQ ID NO: 65809 - RNA, 36 nt, Synthetic Construct
  source 1..36: mol_type = other RNA
atccgctgagattcagcccgtgttcggaagattttc

SEQ ID NO: 65810 - RNA, 16 nt, Synthetic Construct
  source 1..16: mol_type = other RNA
gcggtggagcatgtgg

SEQ ID NO: 65811 - RNA, 18 nt, Synthetic Construct
  source 1..18: mol_type = other RNA
ctgtgaaactgcgaatgg

SEQ ID NO: 65812 - RNA, 26 nt, Synthetic Construct
  source 1..26: mol_type = other RNA
ttagtgacgcgcatgaatggattaac

SEQ ID NO: 65813 - RNA, 16 nt, Synthetic Construct
  source 1..16: mol_type = other RNA
gctcgcgttgattacg

SEQ ID NO: 65814 - RNA, 30 nt, Synthetic Construct
  source 1..30: mol_type = other RNA
cagtaaacggtgcacgcttggtgtgggggg

SEQ ID NO: 65815 - RNA, 21 nt, Synthetic Construct
  source 1..21: mol_type = other RNA
gccgaagctatgggatttgtt

SEQ ID NO: 65816 - RNA, 19 nt, Synthetic Construct
  source 1..19: mol_type = other RNA
ctggtaactgggatgaagt

SEQ ID NO: 65817 - RNA, 25 nt, Synthetic Construct
  source 1..25: mol_type = other RNA
ttcagcccgtgttcggaagattttc

SEQ ID NO: 65818 - RNA, 24 nt, Synthetic Construct
  source 1..24: mol_type = other RNA
tcaaatgactaagggcttatggtg

SEQ ID NO: 65819 - RNA, 22 nt, Synthetic Construct
  source 1..22: mol_type = other RNA
ttcgacctgagctcaggcaagg

SEQ ID NO: 65820 - RNA, 17 nt, Synthetic Construct
  source 1..17: mol_type = other RNA
gatgtctagcgggtgtg

SEQ ID NO: 65821 - RNA, 20 nt, Synthetic Construct
  source 1..20: mol_type = other RNA
gttgaattgtggtctgtgga

SEQ ID NO: 65822 - RNA, 18 nt, Synthetic Construct
  source 1..18: mol_type = other RNA
actagggattggcaagga

SEQ ID NO: 65823 - RNA, 21 nt, Synthetic Construct
  source 1..21: mol_type = other RNA
tcggcgggtggcaaacccgta

SEQ ID NO: 65824 - RNA, 22 nt, Synthetic Construct
  source 1..22: mol_type = other RNA
cttcggaagaaggggtgcctgg

SEQ ID NO: 65825 - RNA, 28 nt, Synthetic Construct
  source 1..28: mol_type = other RNA
gcaagagcatgtctgcctcagcgtcggt

SEQ ID NO: 65826 - RNA, 16 nt, Synthetic Construct
  source 1..16: mol_type = other RNA
cgctctcagcggcgga

SEQ ID NO: 65827 - RNA, 23 nt, Synthetic Construct
  source 1..23: mol_type = other RNA
gtctttcggaatttgaagctaga

SEQ ID NO: 65828 - RNA, 17 nt, Synthetic Construct
  source 1..17: mol_type = other RNA
gtgttcggaagattttc

SEQ ID NO: 65829 - RNA, 19 nt, Synthetic Construct
  source 1..19: mol_type = other RNA
gccggctggaagtttgagg

SEQ ID NO: 65830 - RNA, 22 nt, Synthetic Construct
  source 1..22: mol_type = other RNA
tcaaatgactaagggcttatgg

SEQ ID NO: 65831 - RNA, 25 nt, Synthetic Construct
  source 1..25: mol_type = other RNA
agagcatgtctgcctcagcgtcggt

SEQ ID NO: 65832 - RNA, 19 nt, Synthetic Construct
  source 1..19: mol_type = other RNA
gcagaactggcgatgcggg

SEQ ID NO: 65833 - RNA, 17 nt, Synthetic Construct
  source 1..17: mol_type = other RNA
tctgcctcagcgtcggt

SEQ ID NO: 65834 - RNA, 37 nt, Synthetic Construct
  source 1..37: mol_type = other RNA
gatccgctgagattcagcccgtgttcggaagattttc

SEQ ID NO: 65835 - RNA, 22 nt, Synthetic Construct
  source 1..22: mol_type = other RNA
gcggctggatcacctcctttct

SEQ ID NO: 65836 - RNA, 21 nt, Synthetic Construct
  source 1..21: mol_type = other RNA
catgtctgcctcagcgtcggt

SEQ ID NO: 65837 - RNA, 19 nt, Synthetic Construct
  source 1..19: mol_type = other RNA
gctcagtggaaaggatgtg

SEQ ID NO: 65838 - RNA, 17 nt, Synthetic Construct
  source 1..17: mol_type = other RNA
cgaaattccttgtcggg

SEQ ID NO: 65839 - RNA, 39 nt, Synthetic Construct
  source 1..39: mol_type = other RNA
acgatccgctgagattcagcccgtgttcggaagattttc

SEQ ID NO: 65840 - RNA, 18 nt, Synthetic Construct
  source 1..18: mol_type = other RNA
ttggggttgtaggaccac

SEQ ID NO: 65841 - RNA, 21 nt, Synthetic Construct
  source 1..21: mol_type = other RNA
cttagacagtgaggatgttgg

SEQ ID NO: 65842 - RNA, 16 nt, Synthetic Construct
  source 1..16: mol_type = other RNA
ggtttgagtcggagca

SEQ ID NO: 65843 - RNA, 23 nt, Synthetic Construct
  source 1..23: mol_type = other RNA
tgcggctggatcacctcctttct

SEQ ID NO: 65844 - RNA, 17 nt, Synthetic Construct
  source 1..17: mol_type = other RNA
gggtctgtagctcagtc

SEQ ID NO: 65845 - RNA, 25 nt, Synthetic Construct
  source 1..25: mol_type = other RNA
tcaaatgactaagggcttatggtgg

SEQ ID NO: 65846 - RNA, 21 nt, Synthetic Construct
  source 1..21: mol_type = other RNA
atgatccggtgaagttttcgg

SEQ ID NO: 65847 - RNA, 28 nt, Synthetic Construct
  source 1..28: mol_type = other RNA
ccttaacggattggctgggcttcgaaac

SEQ ID NO: 65848 - RNA, 25 nt, Synthetic Construct
  source 1..25: mol_type = other RNA
cgagtcggcgggtggcaaacccgta

SEQ ID NO: 65849 - RNA, 21 nt, Synthetic Construct
  source 1..21: mol_type = other RNA
tggaagtggggttgtgggaat

SEQ ID NO: 65850 - RNA, 16 nt, Synthetic Construct
  source 1..16: mol_type = other RNA
ttgatcttcaacgagg

SEQ ID NO: 65851 - RNA, 17 nt, Synthetic Construct
  source 1..17: mol_type = other RNA
tcttcgggaccggagta

SEQ ID NO: 65852 - RNA, 18 nt, Synthetic Construct
  source 1..18: mol_type = other RNA
gtctttcggaatttgaag

SEQ ID NO: 65853 - RNA, 18 nt, Synthetic Construct
  source 1..18: mol_type = other RNA
agggacgcatttattaga

SEQ ID NO: 65854 - RNA, 22 nt, Synthetic Construct
  source 1..22: mol_type = other RNA
gcatgtctgcctcagcgtcggt

SEQ ID NO: 65855 - RNA, 18 nt, Synthetic Construct
  source 1..18: mol_type = other RNA
gtagtcatatgcttgtct

SEQ ID NO: 65856 - RNA, 29 nt, Synthetic Construct
  source 1..29: mol_type = other RNA
cgcgaggtggaggaaatctataaaaccag

SEQ ID NO: 65857 - RNA, 35 nt, Synthetic Construct; identical to SEQ ID NO: 1677
  source 1..35: mol_type = other RNA

SEQ ID NO: 65858 - RNA, 33 nt, Synthetic Construct; identical to SEQ ID NO: 2253
  source 1..33: mol_type = other RNA

SEQ ID NO: 65859 - RNA, 18 nt, Synthetic Construct
  source 1..18: mol_type = other RNA
gttttcggattgcggcga

SEQ ID NO: 65860 - RNA, 21 nt, Synthetic Construct
  source 1..21: mol_type = other RNA
cggtcccaagggtatggctgt

SEQ ID NO: 65861 - RNA, 24 nt, Synthetic Construct
  source 1..24: mol_type = other RNA
gatgaggcgtgataacgagtctgc

SEQ ID NO: 65862 - RNA, 22 nt, Synthetic Construct
  source 1..22: mol_type = other RNA
gttgaattgtggtctgtggacg

SEQ ID NO: 65863 - RNA, 19 nt, Synthetic Construct
  source 1..19: mol_type = other RNA
ccgctcgcgcccggtcgta

SEQ ID NO: 65864 - RNA, 17 nt, Synthetic Construct
  source 1..17: mol_type = other RNA
cgaatcggtaggggagc

SEQ ID NO: 65865 - RNA, 18 nt, Synthetic Construct
  source 1..18: mol_type = other RNA
gtcgacgtatagggtgtg

SEQ ID NO: 65866 - RNA, 23 nt, Synthetic Construct
  source 1..23: mol_type = other RNA
tacgcctgtctgagcgtcgcttt

SEQ ID NO: 65867 - RNA, 25 nt, Synthetic Construct
  source 1..25: mol_type = other RNA
ggtttaggaaatctctgaaatttca

SEQ ID NO: 65868 - RNA, 20 nt, Synthetic Construct
  source 1..20: mol_type = other RNA
cccagtaaacggcggccgta

SEQ ID NO: 65869 - RNA, 16 nt, Synthetic Construct
  source 1..16: mol_type = other RNA
ctgcttgagcgccgct

SEQ ID NO: 65870 - RNA, 25 nt, Synthetic Construct
  source 1..25: mol_type = other RNA
cccagtcgtgggggataactgctcg

SEQ ID NO: 65871 - RNA, 23 nt, Synthetic Construct
  source 1..23: mol_type = other RNA
tctcatggagagtttgatcctgg

SEQ ID NO: 65872 - RNA, 22 nt, Synthetic Construct
  source 1..22: mol_type = other RNA
ggcagggttcgtgactggggtg

SEQ ID NO: 65873 - RNA, 24 nt, Synthetic Construct
  source 1..24: mol_type = other RNA
ttttcagtacgaatacaaactgtg

SEQ ID NO: 65874 - RNA, 28 nt, Synthetic Construct
  source 1..28: mol_type = other RNA
ttgtgaagcagaattcaccaagtgttgg

SEQ ID NO: 65875 - RNA, 17 nt, Synthetic Construct
  source 1..17: mol_type = other RNA
tcccagaaacccggtcg

SEQ ID NO: 65876 - RNA, 43 nt, Synthetic Construct
  source 1..43: mol_type = other RNA
atcccctggacctgtactgacgctcatgcacgaaagcgtgggg

SEQ ID NO: 65877 - RNA, 20 nt, Synthetic Construct
  source 1..20: mol_type = other RNA
ccgaagctatgggatttgtt

SEQ ID NO: 65878 - RNA, 23 nt, Synthetic Construct
  source 1..23: mol_type = other RNA
acaatgtaggtaagggaagtcgt

SEQ ID NO: 65879 - RNA, 16 nt, Synthetic Construct
  source 1..16: mol_type = other RNA
cgattgtctgctgagc

SEQ ID NO: 65880 - RNA, 21 nt, Synthetic Construct
  source 1..21: mol_type = other RNA
ggaatcgctagtaatcgcgga

SEQ ID NO: 65881 - RNA, 17 nt, Synthetic Construct
  source 1..17: mol_type = other RNA
ttgtgttggtcttcggg

SEQ ID NO: 65882 - RNA, 26 nt, Synthetic Construct
  source 1..26: mol_type = other RNA
attcagcccgtgttcggaagattttc

SEQ ID NO: 65883 - RNA, 19 nt, Synthetic Construct
  source 1..19: mol_type = other RNA
ccagtaaacggcggccgta

SEQ ID NO: 65884 - RNA, 16 nt, Synthetic Construct
  source 1..16: mol_type = other RNA
gtccggatcgtagtct

SEQ ID NO: 65885 - RNA, 22 nt, Synthetic Construct
  source 1..22: mol_type = other RNA
gtcttgagtggacgggtgtaga

SEQ ID NO: 65886 - RNA, 18 nt, Synthetic Construct
  source 1..18: mol_type = other RNA
gttgaattgtggtctgtg

SEQ ID NO: 65887 - RNA, 19 nt, Synthetic Construct
  source 1..19: mol_type = other RNA
gttgaattgtggtctgtgg

SEQ ID NO: 65888 - RNA, 21 nt, Synthetic Construct
  source 1..21: mol_type = other RNA
gtagcgaaattccttgtcggg

SEQ ID NO: 65889 - RNA, 21 nt, Synthetic Construct
  source 1..21: mol_type = other RNA
agcgtgcttgactgcgagact

SEQ ID NO: 65890 - RNA, 28 nt, Synthetic Construct
  source 1..28: mol_type = other RNA
cgcgaggtggaggaaatctataaaacca

SEQ ID NO: 65891 - RNA, 19 nt, Synthetic Construct
  source 1..19: mol_type = other RNA
caagcggtggatgatgtgg

SEQ ID NO: 65892 - RNA, 20 nt, Synthetic Construct
  source 1..20: mol_type = other RNA
tcctgtctgaatatgggggg

SEQ ID NO: 65893 - RNA, 18 nt, Synthetic Construct
  source 1..18: mol_type = other RNA
gtccccgaattgtagtct

SEQ ID NO: 65894 - RNA, 19 nt, Synthetic Construct
  source 1..19: mol_type = other RNA
agtcgacgtatagggtgtg

SEQ ID NO: 65895 - RNA, 31 nt, Synthetic Construct
  source 1..31: mol_type = other RNA
ctgtataaggtacatatggttgagtgtcgta

SEQ ID NO: 65896 - RNA, 17 nt, Synthetic Construct
  source 1..17: mol_type = other RNA
atcgtgacgatagtgca

SEQ ID NO: 65897 - RNA, 17 nt, Synthetic Construct
  source 1..17: mol_type = other RNA
ggacgttgataggctgg

SEQ ID NO: 65898 - RNA, 28 nt, Synthetic Construct
  source 1..28: mol_type = other RNA
gcaagagcatgtctggctcagcgtcggt

SEQ ID NO: 65899 - RNA, 20 nt, Synthetic Construct
  source 1..20: mol_type = other RNA
cacatgcaagtcgaacggta

SEQ ID NO: 65900 - RNA, 30 nt, Synthetic Construct; identical to SEQ ID NO: 1958
  source 1..30: mol_type = other RNA

SEQ ID NO: 65901 - RNA, 17 nt, Synthetic Construct
  source 1..17: mol_type = other RNA
tcagttttgtcaggtaa

SEQ ID NO: 65902 - RNA, 16 nt, Synthetic Construct
  source 1..16: mol_type = other RNA
ttggcggaatactatg

SEQ ID NO: 65903 - RNA, 20 nt, Synthetic Construct
  source 1..20: mol_type = other RNA
gctcagtggaaaggatgtga

SEQ ID NO: 65904 - RNA, 17 nt, Synthetic Construct
  source 1..17: mol_type = other RNA
accggaggaaggtgggg

SEQ ID NO: 65905 - RNA, 16 nt, Synthetic Construct
  source 1..16: mol_type = other RNA
tgttcggaagattttc

SEQ ID NO: 65906 - RNA, 20 nt, Synthetic Construct
  source 1..20: mol_type = other RNA
actgatcgagtcgtcctgcg

SEQ ID NO: 65907 - RNA, 24 nt, Synthetic Construct
  source 1..24: mol_type = other RNA
ggaacactagtggcgtaggcgaga

SEQ ID NO: 65908 - RNA, 18 nt, Synthetic Construct
  source 1..18: mol_type = other RNA
tcatttagaggaaggaga

SEQ ID NO: 65909 - RNA, 18 nt, Synthetic Construct
  source 1..18: mol_type = other RNA
gcaggacggtggtcatgg

SEQ ID NO: 65910 - RNA, 17 nt, Synthetic Construct
  source 1..17: mol_type = other RNA
gccatgccgcgtgcggg

SEQ ID NO: 65911 - RNA, 16 nt, Synthetic Construct
  source 1..16: mol_type = other RNA
gtcgacgtatagggtg

SEQ ID NO: 65912 - RNA, 22 nt, Synthetic Construct
  source 1..22: mol_type = other RNA
ggtagcgaaattccttgtcggg

SEQ ID NO: 65913 - RNA, 29 nt, Synthetic Construct
  source 1..29: mol_type = other RNA
agtaaacggtgcacgcttggtgtgggggg

SEQ ID NO: 65914 - RNA, 23 nt, Synthetic Construct
  source 1..23: mol_type = other RNA
gtctggtaattggaatgagtaca

SEQ ID NO: 65915 - RNA, 16 nt, Synthetic Construct
  source 1..16: mol_type = other RNA
cccctggacctgtact

SEQ ID NO: 65916 - RNA, 18 nt, Synthetic Construct
  source 1..18: mol_type = other RNA
cctcgcgcgattggagcg

SEQ ID NO: 65917 - RNA, 22 nt, Synthetic Construct
  source 1..22: mol_type = other RNA
tatcggaacgtgcccagtcgtg

SEQ ID NO: 65918 - RNA, 34 nt, Synthetic Construct
  source 1..34: mol_type = other RNA
ttggaaacgactgctaataccgcataagcgcaca

SEQ ID NO: 65919 - RNA, 17 nt, Synthetic Construct
  source 1..17: mol_type = other RNA
gcgaaatgcgatacgta

SEQ ID NO: 65920 - RNA, 16 nt, Synthetic Construct
  source 1..16: mol_type = other RNA
tcagttttgtcaggta

SEQ ID NO: 65921 - RNA, 21 nt, Synthetic Construct
  source 1..21: mol_type = other RNA
ctgccgaagctgtgggatgtc

SEQ ID NO: 65922 - RNA, 19 nt, Synthetic Construct
  source 1..19: mol_type = other RNA
gttgacctcggatcaggta

SEQ ID NO: 65923 - RNA, 17 nt, Synthetic Construct
  source 1..17: mol_type = other RNA
catgcaagtcgaacggt

SEQ ID NO: 65924 - RNA, 30 nt, Synthetic Construct
  source 1..30: mol_type = other RNA
agtgcatgcactctggggttgtgggacagc

SEQ ID NO: 65925 - RNA, 17 nt, Synthetic Construct
  source 1..17: mol_type = other RNA
gtcatatgcttgtctca

SEQ ID NO: 65926 - RNA, 21 nt, Synthetic Construct
  source 1..21: mol_type = other RNA
tttcatcgtgatggggataga

SEQ ID NO: 65927 - RNA, 32 nt, Synthetic Construct; identical to SEQ ID NO: 2318
  source 1..32: mol_type = other RNA

SEQ ID NO: 65928 - RNA, 25 nt, Synthetic Construct
  source 1..25: mol_type = other RNA
gttgaattgtggtctgtggacgtgg

SEQ ID NO: 65929 - RNA, 22 nt, Synthetic Construct
  source 1..22: mol_type = other RNA
ctttgttcgattccgttgagta

SEQ ID NO: 65930 - RNA, 31 nt, Synthetic Construct
  source 1..31: mol_type = other RNA
ctgcttggactacatatggttgagggttgta

SEQ ID NO: 65931 - RNA, 17 nt, Synthetic Construct
  source 1..17: mol_type = other RNA
ttggggttgtaggacca

SEQ ID NO: 65932 - RNA, 25 nt, Synthetic Construct
  source 1..25: mol_type = other RNA
cctcgcgcgattggagcggccgata

SEQ ID NO: 65933 - RNA, 17 nt, Synthetic Construct
  source 1..17: mol_type = other RNA
gaagttgaccgcctggg

SEQ ID NO: 65934 - RNA, 18 nt, Synthetic Construct
  source 1..18: mol_type = other RNA
gaagttgaccgcctgggg

SEQ ID NO: 65935 - RNA, 17 nt, Synthetic Construct
  source 1..17: mol_type = other RNA
gtccggatcgtagtctg

SEQ ID NO: 65936 - RNA, 19 nt, Synthetic Construct
  source 1..19: mol_type = other RNA
cacatgcaagtcgaacggt

SEQ ID NO: 65937 - RNA, 19 nt, Synthetic Construct
  source 1..19: mol_type = other RNA
gtgatagtctcgtagtcga

SEQ ID NO: 65938 - RNA, 20 nt, Synthetic Construct
  source 1..20: mol_type = other RNA
gccttggttgtaggatctgt

SEQ ID NO: 65939 - RNA, 17 nt, Synthetic Construct
  source 1..17: mol_type = other RNA
gtttttgggttccgggg

SEQ ID NO: 65940 - RNA, 17 nt, Synthetic Construct
  source 1..17: mol_type = other RNA
atgcaagtcgaacggta

SEQ ID NO: 65941 - RNA, 30 nt, Synthetic Construct; identical to SEQ ID NO: 2353
  source 1..30: mol_type = other RNA

SEQ ID NO: 65942 - RNA, 18 nt, Synthetic Construct
  source 1..18: mol_type = other RNA
cgccgatgatagtgcgga

SEQ ID NO: 65943 - RNA, 21 nt, Synthetic Construct
  source 1..21: mol_type = other RNA
tcccagtaaacggcggccgta

SEQ ID NO: 65944 - RNA, 16 nt, Synthetic Construct
  source 1..16: mol_type = other RNA
agagtagggcgggaca

SEQ ID NO: 65945 - RNA, 23 nt, Synthetic Construct
  source 1..23: mol_type = other RNA
gcgtagatatgcggaggaacacc

SEQ ID NO: 65946 - RNA, 20 nt, Synthetic Construct
  source 1..20: mol_type = other RNA
tcggaacgtgcccagtcgtg

SEQ ID NO: 65947 - RNA, 20 nt, Synthetic Construct
  source 1..20: mol_type = other RNA
ggcaagatggggtcgtgtgg

SEQ ID NO: 65948 - RNA, 18 nt, Synthetic Construct
  source 1..18: mol_type = other RNA
tgctcgtgcggcttgacc

SEQ ID NO: 65949 - RNA, 19 nt, Synthetic Construct
  source 1..19: mol_type = other RNA
cctgtctgaatatgggggg

SEQ ID NO: 65950 - RNA, 23 nt, Synthetic Construct
  source 1..23: mol_type = other RNA
tctttgttcgattccgttgagta

SEQ ID NO: 65951 - RNA, 40 nt, Synthetic Construct
  source 1..40: mol_type = other RNA
tcccctggacctgtactgacgctcatgcacgaaagcgtgg

SEQ ID NO: 65952 - RNA, 36 nt, Synthetic Construct; identical to SEQ ID NO: 2520
  source 1..36: mol_type = other RNA

SEQ ID NO: 65953 - RNA, 19 nt, Synthetic Construct
  source 1..19: mol_type = other RNA
tctaatgagactgccggtg

SEQ ID NO: 65954 - RNA, 16 nt, Synthetic Construct
  source 1..16: mol_type = other RNA
tcgtgacgatagtgca

SEQ ID NO: 65955 - RNA, 21 nt, Synthetic Construct
  source 1..21: mol_type = other RNA
atcggaacgtgcccagtcgtg

SEQ ID NO: 65956 - RNA, 22 nt, Synthetic Construct
  source 1..22: mol_type = other RNA
gagagcctggacacaggtgctg

SEQ ID NO: 65957 - RNA, 16 nt, Synthetic Construct
  source 1..16: mol_type = other RNA
ggtgggggtcgttggt

SEQ ID NO: 65958 - RNA, 18 nt, Synthetic Construct
  source 1..18: mol_type = other RNA
tcccaagggtatggctgt

SEQ ID NO: 65959 - RNA, 16 nt, Synthetic Construct
  source 1..16: mol_type = other RNA
tgcgtagatatgcgga

SEQ ID NO: 65960 - RNA, 16 nt, Synthetic Construct
  source 1..16: mol_type = other RNA
tgcgatacgtagtgtg

SEQ ID NO: 65961 - RNA, 18 nt, Synthetic Construct
  source 1..18: mol_type = other RNA
ctaatgagactgccggtg

SEQ ID NO: 65962 - RNA, 38 nt, Synthetic Construct
  source 1..38: mol_type = other RNA
cgactgaagcgggatgagctcacagtgtgaatcggcgc

SEQ ID NO: 65963 - RNA, 23 nt, Synthetic Construct
  source 1..23: mol_type = other RNA
tacttagacagtgaggatgttgg

SEQ ID NO: 65964 - RNA, 20 nt, Synthetic Construct
  source 1..20: mol_type = other RNA
caatggccgggacagagggc

SEQ ID NO: 65965 - RNA, 25 nt, Synthetic Construct
  source 1..25: mol_type = other RNA
gggttgtaaaccgcttttgtcaggg

SEQ ID NO: 65966 - RNA, 27 nt, Synthetic Construct
  source 1..27: mol_type = other RNA
gttggttcaagcgtgtagtcgtgctct

SEQ ID NO: 65967 - RNA, 17 nt, Synthetic Construct
  source 1..17: mol_type = other RNA
agcggtggagcatgtgg

SEQ ID NO: 65968 - RNA, 17 nt, Synthetic Construct
  source 1..17: mol_type = other RNA
ccagtaaacggcggccg

SEQ ID NO: 65969 - RNA, 26 nt, Synthetic Construct
  source 1..26: mol_type = other RNA
gggttgtaaaccgcttttgtcaggga

SEQ ID NO: 65970 - RNA, 26 nt, Synthetic Construct
  source 1..26: mol_type = other RNA
gagcagctaataccgcatacgacctg

SEQ ID NO: 65971 - RNA, 16 nt, Synthetic Construct
  source 1..16: mol_type = other RNA
gcggtggatgatgtgg

SEQ ID NO: 65972 - RNA, 20 nt, Synthetic Construct
  source 1..20: mol_type = other RNA
tactgtgaaactgcgaatgg

SEQ ID NO: 65973 - RNA, 17 nt, Synthetic Construct
  source 1..17: mol_type = other RNA
cagtagctcgaggaaaa

SEQ ID NO: 65974 - RNA, 19 nt, Synthetic Construct
  source 1..19: mol_type = other RNA
gagattccgaaagtagtgg

SEQ ID NO: 65975 - RNA, 16 nt, Synthetic Construct
  source 1..16: mol_type = other RNA
ttggctggggcgtgga

SEQ ID NO: 65976 - RNA, 26 nt, Synthetic Construct
  source 1..26: mol_type = other RNA
cgccatttaaagaggtacgtgagctg

SEQ ID NO: 65977 - RNA, 16 nt, Synthetic Construct
  source 1..16: mol_type = other RNA
cccagaaacccggtcg

SEQ ID NO: 65978 - RNA, 19 nt, Synthetic Construct
  source 1..19: mol_type = other RNA
ggcgtgataacgagtctgc

SEQ ID NO: 65979 - RNA, 18 nt, Synthetic Construct
  source 1..18: mol_type = other RNA
atggccgggacagagggc

SEQ ID NO: 65980 - RNA, 35 nt, Synthetic Construct; identical to SEQ ID NO: 3369
  source 1..35: mol_type = other RNA

SEQ ID NO: 65981 - RNA, 18 nt, Synthetic Construct
  source 1..18: mol_type = other RNA
tcagtagctcgaggaaaa

SEQ ID NO: 65982 - RNA, 19 nt, Synthetic Construct
  source 1..19: mol_type = other RNA
tcagtagctcgaggaaaag

SEQ ID NO: 65983 - RNA, 16 nt, Synthetic Construct
  source 1..16: mol_type = other RNA
agcggtggatgatgtg

SEQ ID NO: 65984 - RNA, 18 nt, Synthetic Construct
  source 1..18: mol_type = other RNA
caagcggtggatgatgtg

SEQ ID NO: 65985 - RNA, 25 nt, Synthetic Construct
  source 1..25: mol_type = other RNA
tgtcggctcatctcatcctggggct

SEQ ID NO: 65986 - RNA, 20 nt, Synthetic Construct
  source 1..20: mol_type = other RNA
catgcaagtcgaacggaaca

SEQ ID NO: 65987 - RNA, 17 nt, Synthetic Construct
  source 1..17: mol_type = other RNA
tccggtgaagttttcgg

SEQ ID NO: 65988 - RNA, 16 nt, Synthetic Construct
  source 1..16: mol_type = other RNA
gaaattccttgtcggg

SEQ ID NO: 65989 - RNA, 18 nt, Synthetic Construct
  source 1..18: mol_type = other RNA
cctgtaccgatcaatagt

SEQ ID NO: 65990 - RNA, 23 nt, Synthetic Construct
  source 1..23: mol_type = other RNA
tcggaatcgctagtaatcgcgga

SEQ ID NO: 65991 - RNA, 23 nt, Synthetic Construct
  source 1..23: mol_type = other RNA
ctgccgaagctgtgggatgtccg

SEQ ID NO: 65992 - RNA, 20 nt, Synthetic Construct
  source 1..20: mol_type = other RNA
cttagacagtgaggatgttg

SEQ ID NO: 65993 - RNA, 19 nt, Synthetic Construct
  source 1..19: mol_type = other RNA
ttccgtgaggtggaggcgg

SEQ ID NO: 65994 - RNA, 16 nt, Synthetic Construct
  source 1..16: mol_type = other RNA
attggctggggcgtgg

SEQ ID NO: 65995 - RNA, 42 nt, Synthetic Construct
  source 1..42: mol_type = other RNA
tcccctggacctgtactgacgctcatgcacgaaagcgtgggg

SEQ ID NO: 65996 - RNA, 21 nt, Synthetic Construct
  source 1..21: mol_type = other RNA
ctaatcccagaaacccggtcg

SEQ ID NO: 65997 - RNA, 18 nt, Synthetic Construct
  source 1..18: mol_type = other RNA
gagattccgaaagtagtg

SEQ ID NO: 65998 - RNA, 21 nt, Synthetic Construct
  source 1..21: mol_type = other RNA
gctattgacgaccgtaccgca

SEQ ID NO: 65999 - RNA, 17 nt, Synthetic Construct
  source 1..17: mol_type = other RNA
ttcagttttgtcaggta

SEQ ID NO: 66000 - RNA, 43 nt, Synthetic Construct; identical to SEQ ID NO: 6202
  source 1..43: mol_type = other RNA

SEQ ID NO: 66001 - RNA, 20 nt, Synthetic Construct
  source 1..20: mol_type = other RNA
attattgatcttcaacgagg

SEQ ID NO: 66002 - RNA, 19 nt, Synthetic Construct
  source 1..19: mol_type = other RNA
ttattgatcttcaacgagg

SEQ ID NO: 66003 - RNA, 16 nt, Synthetic Construct
  source 1..16: mol_type = other RNA
aggattcggtctgccg

SEQ ID NO: 66004 - RNA, 16 nt, Synthetic Construct
  source 1..16: mol_type = other RNA
gaggtacgtgagctgg

SEQ ID NO: 66005 - RNA, 22 nt, Synthetic Construct
  source 1..22: mol_type = other RNA
agctttgatccggagatttccg

SEQ ID NO: 66006 - RNA, 19 nt, Synthetic Construct
  source 1..19: mol_type = other RNA
atggccgggacagagggct

SEQ ID NO: 66007 - RNA, 31 nt, Synthetic Construct; identical to SEQ ID NO: 2310
  source 1..31: mol_type = other RNA

SEQ ID NO: 66008 - RNA, 16 nt, Synthetic Construct
  source 1..16: mol_type = other RNA
ctgacgctcatgcacg

SEQ ID NO: 66009 - RNA, 16 nt, Synthetic Construct
  source 1..16: mol_type = other RNA
gagctgtggatagggg

SEQ ID NO: 66010 - RNA, 23 nt, Synthetic Construct
  source 1..23: mol_type = other RNA
gcgtggtaggagagcgttctgta

SEQ ID NO: 66011 - RNA, 24 nt, Synthetic Construct
  source 1..24: mol_type = other RNA
gggttgtaaaccgcttttgtcagg

SEQ ID NO: 66012 - RNA, 20 nt, Synthetic Construct
  source 1..20: mol_type = other RNA
aagtcgacgtatagggtgtg

SEQ ID NO: 66013 - RNA, 24 nt, Synthetic Construct
  source 1..24: mol_type = other RNA
actagcggatgagctgtggatagg

SEQ ID NO: 66014 - RNA, 25 nt, Synthetic Construct
  source 1..25: mol_type = other RNA
actagcggatgagctgtggataggg

SEQ ID NO: 66015 - RNA, 21 nt, Synthetic Construct
  source 1..21: mol_type = other RNA
caatggccgggacagagggct

SEQ ID NO: 66016 - RNA, 20 nt, Synthetic Construct
  source 1..20: mol_type = other RNA
ccgcagagtacagcttggga

SEQ ID NO: 66017 - RNA, 27 nt, Synthetic Construct
  source 1..27: mol_type = other RNA
cgcacctctggtgtatcggttgtcacg

SEQ ID NO: 66018 - RNA, 24 nt, Synthetic Construct
  source 1..24: mol_type = other RNA
cggagaaggttagctcagccaact

SEQ ID NO: 66019 - RNA, 21 nt, Synthetic Construct
  source 1..21: mol_type = other RNA
gagagcctggacacaggtgct

SEQ ID NO: 66020 - RNA, 20 nt, Synthetic Construct
  source 1..20: mol_type = other RNA
gctattgacgaccgtaccgc

SEQ ID NO: 66021 - RNA, 23 nt, Synthetic Construct
  source 1..23: mol_type = other RNA
ggcgcttgagagaactctggaga

SEQ ID NO: 66022 - RNA, 18 nt, Synthetic Construct
  source 1..18: mol_type = other RNA
ggctttgaagtaaggtcg

SEQ ID NO: 66023 - RNA, 29 nt, Synthetic Construct
  source 1..29: mol_type = other RNA
tgaaggtgggttgtgaagcctgctggagg

SEQ ID NO: 66024 - RNA, 17 nt, Synthetic Construct
  source 1..17: mol_type = other RNA
agtccggatcgtagtct

SEQ ID NO: 66025 - RNA, 17 nt, Synthetic Construct
  source 1..17: mol_type = other RNA
gtcatcagctcgcgttg

SEQ ID NO: 66026 - RNA, 19 nt, Synthetic Construct
  source 1..19: mol_type = other RNA
cctcaagtattacctgcgg

SEQ ID NO: 66027 - RNA, 39 nt, Synthetic Construct
  source 1..39: mol_type = other RNA
gtccggatcgtagtctgcaactcgactgcgtgaagtcgg

SEQ ID NO: 66028 - RNA, 22 nt, Synthetic Construct
  source 1..22: mol_type = other RNA
gacagcaggacggtggtcatgg

SEQ ID NO: 66029 - RNA, 27 nt, Synthetic Construct
  source 1..27: mol_type = other RNA
agagcagctaataccgcatacgacctg

SEQ ID NO: 66030 - RNA, 22 nt, Synthetic Construct
  source 1..22: mol_type = other RNA
cggaggagttcgaaggtacgct

SEQ ID NO: 66031 - RNA, 38 nt, Synthetic Construct; identical to SEQ ID NO: 2492
  source 1..38: mol_type = other RNA

SEQ ID NO: 66032 - RNA, 39 nt, Synthetic Construct; identical to SEQ ID NO: 2398
  source 1..39: mol_type = other RNA

SEQ ID NO: 66033 - RNA, 16 nt, Synthetic Construct
  source 1..16: mol_type = other RNA
acggcccagactccta

SEQ ID NO: 66034 - RNA, 23 nt, Synthetic Construct
  source 1..23: mol_type = other RNA
ctcactgatcgagtcgtcctgcg

SEQ ID NO: 66035 - RNA, 20 nt, Synthetic Construct
  source 1..20: mol_type = other RNA
ctctaatgagactgccggtg

SEQ ID NO: 66036 - RNA, 21 nt, Synthetic Construct
  source 1..21: mol_type = other RNA
gcagaattcaccaagtgttgg

SEQ ID NO: 66037 - RNA, 28 nt, Synthetic Construct
  source 1..28: mol_type = other RNA
gctttgatccggagatttccgaatgggg

SEQ ID NO: 66038 - RNA, 19 nt, Synthetic Construct
  source 1..19: mol_type = other RNA
acatgcaagtcgaacggta

SEQ ID NO: 66039 - RNA, 16 nt, Synthetic Construct
  source 1..16: mol_type = other RNA
gctattgacgaccgta

SEQ ID NO: 66040 - RNA, 23 nt, Synthetic Construct
  source 1..23: mol_type = other RNA
ggcagggttcgtgactggggtga

SEQ ID NO: 66041 - RNA, 17 nt, Synthetic Construct
  source 1..17: mol_type = other RNA
gtcgacgtatagggtgt

SEQ ID NO: 66042 - RNA, 17 nt, Synthetic Construct
  source 1..17: mol_type = other RNA
cggacaaggggaatccg

SEQ ID NO: 66043 - RNA, 18 nt, Synthetic Construct
  source 1..18: mol_type = other RNA
catgcaagtcgaacggta

SEQ ID NO: 66044 - RNA, 20 nt, Synthetic Construct
  source 1..20: mol_type = other RNA
acccttgtcattagttgcta

SEQ ID NO: 66045 - RNA, 20 nt, Synthetic Construct
  source 1..20: mol_type = other RNA
tagcgaaattccttgtcggg

SEQ ID NO: 66046 - RNA, 19 nt, Synthetic Construct
  source 1..19: mol_type = other RNA
aatcgctagtaatcgcgga

SEQ ID NO: 66047 - RNA, 44 nt, Synthetic Construct; identical to SEQ ID NO: 5536
  source 1..44: mol_type = other RNA

SEQ ID NO: 66048 - RNA, 32 nt, Synthetic Construct
  source 1..32: mol_type = other RNA
cctcgatgtcggctcatctcatcctggggctg

SEQ ID NO: 66049 - RNA, 22 nt, Synthetic Construct
  source 1..22: mol_type = other RNA
gtcccagtaaacggcggccgta

SEQ ID NO: 66050 - RNA, 30 nt, Synthetic Construct
  source 1..30: mol_type = other RNA
ggttaagccgggaactttaaggatactgcc

SEQ ID NO: 66051 - RNA, 18 nt, Synthetic Construct
  source 1..18: mol_type = other RNA
acgagtggcgaacgggtg

SEQ ID NO: 66052 - RNA, 22 nt, Synthetic Construct
  source 1..22: mol_type = other RNA
cgatgtcaactggttgttggga

SEQ ID NO: 66053 - RNA, 29 nt, Synthetic Construct
  source 1..29: mol_type = other RNA
cggagtggacgcacctctggtgtatcggt

SEQ ID NO: 66054 - RNA, 23 nt, Synthetic Construct
  source 1..23: mol_type = other RNA
cgggatggggacagtgtatggtg

SEQ ID NO: 66055 - RNA, 17 nt, Synthetic Construct
  source 1..17: mol_type = other RNA
gattccgaaagtagtgg

SEQ ID NO: 66056 - RNA, 22 nt, Synthetic Construct
  source 1..22: mol_type = other RNA
ggaggagttcgaaggtacgcta

SEQ ID NO: 66057 - RNA, 23 nt, Synthetic Construct
  source 1..23: mol_type = other RNA
ggtagcgaaattccttgtcgggt

SEQ ID NO: 66058 - RNA, 16 nt, Synthetic Construct
  source 1..16: mol_type = other RNA
ggtagctcgttgggct

SEQ ID NO: 66059 - RNA, 17 nt, Synthetic Construct
  source 1..17: mol_type = other RNA
tcccctggacctgtact

SEQ ID NO: 66060 - RNA, 32 nt, Synthetic Construct
  source 1..32: mol_type = other RNA
tcccctggacctgtactgacgctcatgcacga

SEQ ID NO: 66061 - RNA, 39 nt, Synthetic Construct; identical to SEQ ID NO: 4400
  source 1..39: mol_type = other RNA

SEQ ID NO: 66062 - RNA, 24 nt, Synthetic Construct
  source 1..24: mol_type = other RNA
aggcgcttgagagaactctggaga

SEQ ID NO: 66063 - RNA, 17 nt, Synthetic Construct
  source 1..17: mol_type = other RNA
cccctggacctgtactg

SEQ ID NO: 66064 - RNA, 23 nt, Synthetic Construct
  source 1..23: mol_type = other RNA
cctcgcgcgattggagcggccga

SEQ ID NO: 66065 - RNA, 17 nt, Synthetic Construct
  source 1..17: mol_type = other RNA
ctggaacggacaagggg

SEQ ID NO: 66066 - RNA, 16 nt, Synthetic Construct
  source 1..16: mol_type = other RNA
gcagacgaagtgagtg

SEQ ID NO: 66067 - RNA, 22 nt, Synthetic Construct
  source 1..22: mol_type = other RNA
gctcttgactgaagtcccagta

SEQ ID NO: 66068 - RNA, 28 nt, Synthetic Construct
  source 1..28: mol_type = other RNA
ggagtggacgcacctctggtgtatcggt

SEQ ID NO: 66069 - RNA, 40 nt, Synthetic Construct
  source 1..40: mol_type = other RNA
tacgatccgctgagattcagcccgtgttcggaagattttc

SEQ ID NO: 66070 - RNA, 29 nt, Synthetic Construct
  source 1..29: mol_type = other RNA
gctttgatccggagatttccgaatgggga

SEQ ID NO: 66071 - RNA, 21 nt, Synthetic Construct
  source 1..21: mol_type = other RNA
cactgatcgagtcgtcctgcg

SEQ ID NO: 66072 - RNA, 24 nt, Synthetic Construct
  source 1..24: mol_type = other RNA
ccagtcgtgggggataactgctcg

SEQ ID NO: 66073 - RNA, 31 nt, Synthetic Construct
  source 1..31: mol_type = other RNA
ccggagtggacgcacctctggtgtatcggtt

SEQ ID NO: 66074 - RNA, 17 nt, Synthetic Construct
  source 1..17: mol_type = other RNA
cgagtggcgaacgggtg

SEQ ID NO: 66075 - RNA, 16 nt, Synthetic Construct
  source 1..16: mol_type = other RNA
cgatctgtagctggtc

SEQ ID NO: 66076 - RNA, 30 nt, Synthetic Construct
  source 1..30: mol_type = other RNA
cggagtggacgcacctctggtgtatcggtt

SEQ ID NO: 66077 - RNA, 16 nt, Synthetic Construct
  source 1..16: mol_type = other RNA
gcgtggtaggagagcg

SEQ ID NO: 66078 - RNA, 26 nt, Synthetic Construct
  source 1..26: mol_type = other RNA
ggcgcttgagagaactctggagaagg

SEQ ID NO: 66079 - RNA, 24 nt, Synthetic Construct
  source 1..24: mol_type = other RNA
tatatcggaacgtgcccagtcgtg

SEQ ID NO: 66080 - RNA, 26 nt, Synthetic Construct
  source 1..26: mol_type = other RNA
tgtcggctcatctcatcctggggctg

SEQ ID NO: 66081 - RNA, 17 nt, Synthetic Construct
  source 1..17: mol_type = other RNA
gcgtagatatgcggagg

SEQ ID NO: 66082 - RNA, 18 nt, Synthetic Construct
  source 1..18: mol_type = other RNA
gttttgtcaggtaaagcg

SEQ ID NO: 66083 - RNA, 21 nt, Synthetic Construct
  source 1..21: mol_type = other RNA
gattgaacgctggcggcatgc

SEQ ID NO: 66084 - RNA, 18 nt, Synthetic Construct
  source 1..18: mol_type = other RNA
tttcattgtcagaggtga

SEQ ID NO: 66085 - RNA, 16 nt, Synthetic Construct
  source 1..16: mol_type = other RNA
cggacaaggggaatcc

SEQ ID NO: 66086 - RNA, 20 nt, Synthetic Construct
  source 1..20: mol_type = other RNA
ttgggacccgaaagatggtg

SEQ ID NO: 66087 - RNA, 25 nt, Synthetic Construct
  source 1..25: mol_type = other RNA
aaagttaggggatcaaagacgatta

SEQ ID NO: 66088 - RNA, 37 nt, Synthetic Construct
  source 1..37: mol_type = other RNA
gactgaagcgggatgagctcacagtgtgaatcggcgc

SEQ ID NO: 66089 - RNA, 34 nt, Synthetic Construct
  source 1..34: mol_type = other RNA
tacctggttgatcctgccagtagtcatatgcttg

SEQ ID NO: 66090 - RNA, 21 nt, Synthetic Construct
  source 1..21: mol_type = other RNA
tcaaatgactaagggcttatg

SEQ ID NO: 66091 - RNA, 19 nt, Synthetic Construct
  source 1..19: mol_type = other RNA
acatgggttagtcgatcct

SEQ ID NO: 66092 - RNA, 18 nt, Synthetic Construct
  source 1..18: mol_type = other RNA
aaccggaggaaggtgggg

SEQ ID NO: 66093 - RNA, 23 nt, Synthetic Construct
  source 1..23: mol_type = other RNA
agcatgtctgcctcagcgtcggt

SEQ ID NO: 66094 - RNA, 23 nt, Synthetic Construct
  source 1..23: mol_type = other RNA
atatcggaacgtgcccagtcgtg

SEQ ID NO: 66095 - RNA, 30 nt, Synthetic Construct; identical to SEQ ID NO: 2840
  source 1..30: mol_type = other RNA

SEQ ID NO: 66096 - RNA, 22 nt, Synthetic Construct
  source 1..22: mol_type = other RNA
cctcgcgcgattggagcggccg

SEQ ID NO: 66097 - RNA, 36 nt, Synthetic Construct; identical to SEQ ID NO: 2469
  source 1..36: mol_type = other RNA

SEQ ID NO: 66098 - RNA, 36 nt, Synthetic Construct; identical to SEQ ID NO: 2366
  source 1..36: mol_type = other RNA

SEQ ID NO: 66099 - RNA, 26 nt, Synthetic Construct
  source 1..26: mol_type = other RNA
gatgcgtggtaggagagcgttctgta

SEQ ID NO: 66100 - RNA, 35 nt, Synthetic Construct; identical to SEQ ID NO: 2505
  source 1..35: mol_type = other RNA

SEQ ID NO: 66101 - RNA, 33 nt, Synthetic Construct; identical to SEQ ID NO: 2386
  source 1..33: mol_type = other RNA

SEQ ID NO: 66102 - RNA, 18 nt, Synthetic Construct
  source 1..18: mol_type = other RNA
ggacgttgataggctggg

SEQ ID NO: 66103 - RNA, 24 nt, Synthetic Construct
  source 1..24: mol_type = other RNA
gtctttgttcgattccgttgagta

SEQ ID NO: 66104 - RNA, 17 nt, Synthetic Construct
  source 1..17: mol_type = other RNA
tggccgggacagagggc

SEQ ID NO: 66105 - RNA, 16 nt, Synthetic Construct
  source 1..16: mol_type = other RNA
gtccccttcgtctaga

SEQ ID NO: 66106 - RNA, 21 nt, Synthetic Construct
  source 1..21: mol_type = other RNA
gttggttcaagcgtgtagtcg

SEQ ID NO: 66107 - RNA, 28 nt, Synthetic Construct
  source 1..28: mol_type = other RNA
aaggcgcttgagagaactctggagaagg

SEQ ID NO: 66108 - RNA, 21 nt, Synthetic Construct
  source 1..21: mol_type = other RNA
cccttgtcattagttgctacg

SEQ ID NO: 66109 - RNA, 31 nt, Synthetic Construct
  source 1..31: mol_type = other RNA
cgggcaagagcatgtctgcctcagcgtcggt

SEQ ID NO: 66110 - RNA, 19 nt, Synthetic Construct
  source 1..19: mol_type = other RNA
gtccggatcgtagtctgca

SEQ ID NO: 66111 - RNA, 22 nt, Synthetic Construct
  source 1..22: mol_type = other RNA
gttggttcaagcgtgtagtcgt

SEQ ID NO: 66112 - RNA, 16 nt, Synthetic Construct
  source 1..16: mol_type = other RNA
tagagtagggcgggac

SEQ ID NO: 66113 - RNA, 23 nt, Synthetic Construct
  source 1..23: mol_type = other RNA
tcactgatcgagtcgtcctgcgc

SEQ ID NO: 66114 - RNA, 18 nt, Synthetic Construct
  source 1..18: mol_type = other RNA
tcccctggacctgtactg

SEQ ID NO: 66115 - RNA, 37 nt, Synthetic Construct
  source 1..37: mol_type = other RNA
tcgactgcgtgaagtcggaatcgctagtaatcgcgga

SEQ ID NO: 66116 - RNA, 26 nt, Synthetic Construct
  source 1..26: mol_type = other RNA
gacttaccaaacctatgcaaactccg

SEQ ID NO: 66117 - RNA, 16 nt, Synthetic Construct
  source 1..16: mol_type = other RNA
gatttgggagtgctcg

SEQ ID NO: 66118 - RNA, 20 nt, Synthetic Construct
  source 1..20: mol_type = other RNA
gactggtaactgggatgaag

SEQ ID NO: 66119 - RNA, 25 nt, Synthetic Construct
  source 1..25: mol_type = other RNA
agatgaggcgtgataacgagtctgc

SEQ ID NO: 66120 - RNA, 18 nt, Synthetic Construct
  source 1..18: mol_type = other RNA
ccagtaaacggcggccgt

SEQ ID NO: 66121 - RNA, 29 nt, Synthetic Construct
  source 1..29: mol_type = other RNA
cgatgtcggctcatctcatcctggggctg

SEQ ID NO: 66122 - RNA, 21 nt, Synthetic Construct
  source 1..21: mol_type = other RNA
ctttgttcgattccgttgagt

SEQ ID NO: 66123 - RNA, 27 nt, Synthetic Construct
  source 1..27: mol_type = other RNA
atagtctttgttcgattccgttgagta

SEQ ID NO: 66124 - RNA, 16 nt, Synthetic Construct
  source 1..16: mol_type = other RNA
ccatgccgcgtgcggg

SEQ ID NO: 66125 - RNA, 22 nt, Synthetic Construct
  source 1..22: mol_type = other RNA
ccggtcccaagggtatggctgt

SEQ ID NO: 66126 - RNA, 17 nt, Synthetic Construct
  source 1..17: mol_type = other RNA
cgatctgtagctggtct

SEQ ID NO: 66127 - RNA, 26 nt, Synthetic Construct
  source 1..26: mol_type = other RNA
gctattgacgaccgtaccgcaaaccg

SEQ ID NO: 66128 - RNA, 20 nt, Synthetic Construct
  source 1..20: mol_type = other RNA
ccaggacgttgataggctgg

SEQ ID NO: 66129 - RNA, 18 nt, Synthetic Construct
  source 1..18: mol_type = other RNA
gagctgtggataggggtg

SEQ ID NO: 66130 - RNA, 39 nt, Synthetic Construct
  source 1..39: mol_type = other RNA
gcctttgtgactgcatggctagagtacggtagaggggga

SEQ ID NO: 66131 - RNA, 24 nt, Synthetic Construct
  source 1..24: mol_type = other RNA
gtcggaatcgctagtaatcgcgga

SEQ ID NO: 66132 - RNA, 30 nt, Synthetic Construct
  source 1..30: mol_type = other RNA
gtggcattgccgagtagctaagtgcggaag

SEQ ID NO: 66133 - RNA, 29 nt, Synthetic Construct
  source 1..29: mol_type = other RNA
gacgcacctctggtgtatcggttgtcacg

SEQ ID NO: 66134 - RNA, 16 nt, Synthetic Construct
  source 1..16: mol_type = other RNA
gtacgtgagctgggtt

SEQ ID NO: 66135 - RNA, 18 nt, Synthetic Construct
  source 1..18: mol_type = other RNA
accggaggaaggtgggga

SEQ ID NO: 66136 - RNA, 17 nt, Synthetic Construct
  source 1..17: mol_type = other RNA
agcggtggatgatgtgg

SEQ ID NO: 66137 - RNA, 20 nt, Synthetic Construct
  source 1..20: mol_type = other RNA
tcagtagctcgaggaaaaga

SEQ ID NO: 66138 - RNA, 31 nt, Synthetic Construct; identical to SEQ ID NO: 2215
  source 1..31: mol_type = other RNA

SEQ ID NO: 66139 - RNA, 20 nt, Synthetic Construct
  source 1..20: mol_type = other RNA
tcctgtaccgatcaatagtg

SEQ ID NO: 66140 - RNA, 23 nt, Synthetic Construct
  source 1..23: mol_type = other RNA
acggaggagttcgaaggtacgct

SEQ ID NO: 66141 - RNA, 22 nt, Synthetic Construct
  source 1..22: mol_type = other RNA
cactgatcgagtcgtcctgcgc

SEQ ID NO: 66142 - RNA, 21 nt, Synthetic Construct
  source 1..21: mol_type = other RNA
gctcacagtgtgaatcggcgc

SEQ ID NO: 66143 - RNA, 40 nt, Synthetic Construct
  source 1..40: mol_type = other RNA
ggaccggagtggacgcacctctggtgtatcggttgtcacg

SEQ ID NO: 66144 - RNA, 20 nt, Synthetic Construct
  source 1..20: mol_type = other RNA
tacctgaagaataagcaccg

SEQ ID NO: 66145 - RNA, 17 nt, Synthetic Construct
  source 1..17: mol_type = other RNA
ctaatgagactgccggt

SEQ ID NO: 66146 - RNA, 25 nt, Synthetic Construct
  source 1..25: mol_type = other RNA
aaggcgcttgagagaactctggaga

SEQ ID NO: 66147 - RNA, 23 nt, Synthetic Construct
  source 1..23: mol_type = other RNA
acgatgtcaactggttgttggga

SEQ ID NO: 66148 - RNA, 17 nt, Synthetic Construct
  source 1..17: mol_type = other RNA
cctcgcgcgattggagc

SEQ ID NO: 66149 - RNA, 21 nt, Synthetic Construct
  source 1..21: mol_type = other RNA
gcctgatccagccatgccgcg

SEQ ID NO: 66150 - RNA, 18 nt, Synthetic Construct
  source 1..18: mol_type = other RNA
ggccgtcgtcagctcgtg

SEQ ID NO: 66151 - RNA, 22 nt, Synthetic Construct
  source 1..22: mol_type = other RNA
ggcggttatgcaagacagaggt

SEQ ID NO: 66152 - RNA, 17 nt, Synthetic Construct
  source 1..17: mol_type = other RNA
cggtcccaagggtatgg

SEQ ID NO: 66153 - RNA, 19 nt, Synthetic Construct
  source 1..19: mol_type = other RNA
ctcaagtattacctgcggg

SEQ ID NO: 66154 - RNA, 21 nt, Synthetic Construct
  source 1..21: mol_type = other RNA
gatgtcaactggttgttggga

SEQ ID NO: 66155 - RNA, 17 nt, Synthetic Construct
  source 1..17: mol_type = other RNA
gccgatgatagtgcgga

SEQ ID NO: 66156 - RNA, 22 nt, Synthetic Construct
  source 1..22: mol_type = other RNA
gtagcgaaattccttgtcgggt

SEQ ID NO: 66157 - RNA, 20 nt, Synthetic Construct
  source 1..20: mol_type = other RNA
tgatccggtgaagttttcgg

SEQ ID NO: 66158 - RNA, 17 nt, Synthetic Construct
  source 1..17: mol_type = other RNA
tcgctagtaatcgcgga

SEQ ID NO: 66159 - RNA, 18 nt, Synthetic Construct
  source 1..18: mol_type = other RNA
actggaacggacaagggg

SEQ ID NO: 66160 - RNA, 32 nt, Synthetic Construct
  source 1..32: mol_type = other RNA
gcccaccaagccaacgatctgtagctggtctg

SEQ ID NO: 66161 - RNA, 42 nt, Synthetic Construct
  source 1..42: mol_type = other RNA
cgaaggacgtgatagcctgcgataagcttcggggagctggca

SEQ ID NO: 66162 - RNA, 31 nt, Synthetic Construct
  source 1..31: mol_type = other RNA
gcagtaaacggtgcacgcttggtgtgggggg

SEQ ID NO: 66163 - RNA, 19 nt, Synthetic Construct
  source 1..19: mol_type = other RNA
gtgcttgaaattgttgagg

SEQ ID NO: 66164 - RNA, 17 nt, Synthetic Construct
  source 1..17: mol_type = other RNA
cgtatttcattgtcaga

SEQ ID NO: 66165 - RNA, 19 nt, Synthetic Construct
  source 1..19: mol_type = other RNA
ttcgacctcagatcagacg

SEQ ID NO: 66166 - RNA, 37 nt, Synthetic Construct; identical to SEQ ID NO: 2365
  source 1..37: mol_type = other RNA

SEQ ID NO: 66167 - RNA, 28 nt, Synthetic Construct
  source 1..28: mol_type = other RNA
aagagcagctaataccgcatacgacctg

SEQ ID NO: 66168 - RNA, 23 nt, Synthetic Construct
  source 1..23: mol_type = other RNA
cggaggagttcgaaggtacgcta

SEQ ID NO: 66169 - RNA, 19 nt, Synthetic Construct
  source 1..19: mol_type = other RNA
ctctttcttgattctatgg

SEQ ID NO: 66170 - RNA, 38 nt, Synthetic Construct
  source 1..38: mol_type = other RNA
gagagcctggacacaggtgctgcatggccgtcgtcagc

SEQ ID NO: 66171 - RNA, 18 nt, Synthetic Construct
  source 1..18: mol_type = other RNA
gctattgacgaccgtacc

SEQ ID NO: 66172 - RNA, 21 nt, Synthetic Construct
  source 1..21: mol_type = other RNA
gctttgatccggagatttccg

SEQ ID NO: 66173 - RNA, 26 nt, Synthetic Construct
  source 1..26: mol_type = other RNA
acctcgcgcgattggagcggccgata

SEQ ID NO: 66174 - RNA, 23 nt, Synthetic Construct
  source 1..23: mol_type = other RNA
cactgatcgagtcgtcctgcgcg

SEQ ID NO: 66175 - RNA, 26 nt, Synthetic Construct
  source 1..26: mol_type = other RNA
cccggtcgtagtccggatcgtagtct

SEQ ID NO: 66176 - RNA, 25 nt, Synthetic Construct
  source 1..25: mol_type = other RNA
gagcagctaataccgcatacgacct

SEQ ID NO: 66177 - RNA, 23 nt, Synthetic Construct
  source 1..23: mol_type = other RNA
taagcgtgcttgactgcgagact

SEQ ID NO: 66178 - RNA, 35 nt, Synthetic Construct; identical to SEQ ID NO: 10694
  source 1..35: mol_type = other RNA

SEQ ID NO: 66179 - RNA, 18 nt, Synthetic Construct
  source 1..18: mol_type = other RNA
ttgggacccgaaagatgg

SEQ ID NO: 66180 - RNA, 34 nt, Synthetic Construct; identical to SEQ ID NO: 2186
  source 1..34: mol_type = other RNA

SEQ ID NO: 66181 - RNA, 22 nt, Synthetic Construct
  source 1..22: mol_type = other RNA
acccttgtcattagttgctacg

SEQ ID NO: 66182 - RNA, 21 nt, Synthetic Construct
  source 1..21: mol_type = other RNA
cgcctgtctgagcgtcgcttt

SEQ ID NO: 66183 - RNA, 19 nt, Synthetic Construct
  source 1..19: mol_type = other RNA
cccttgtcattagttgcta

SEQ ID NO: 66184 - RNA, 22 nt, Synthetic Construct
  source 1..22: mol_type = other RNA
tcagtagctcgaggaaaagaca

SEQ ID NO: 66185 - RNA, 31 nt, Synthetic Construct; identical to SEQ ID NO: 2278
  source 1..31: mol_type = other RNA

SEQ ID NO: 66186 - RNA, 19 nt, Synthetic Construct
  source 1..19: mol_type = other RNA
tcctgtaccgatcaatagt

SEQ ID NO: 66187 - RNA, 18 nt, Synthetic Construct
  source 1..18: mol_type = other RNA
tgcgtagatatgcggagg

SEQ ID NO: 66188 - RNA, 16 nt, Synthetic Construct
  source 1..16: mol_type = other RNA
accgcttttgtcaggg

SEQ ID NO: 66189 - RNA, 31 nt, Synthetic Construct; identical to SEQ ID NO: 2412
  source 1..31: mol_type = other RNA

SEQ ID NO: 66190 - RNA, 20 nt, Synthetic Construct
  source 1..20: mol_type = other RNA
gcagaactggcgatgcggga

SEQ ID NO: 66191 - RNA, 16 nt, Synthetic Construct
  source 1..16: mol_type = other RNA
gcgtagatatgcggag

SEQ ID NO: 66192 - RNA, 34 nt, Synthetic Construct; identical to SEQ ID NO: 2364
  source 1..34: mol_type = other RNA

SEQ ID NO: 66193 - RNA, 22 nt, Synthetic Construct
  source 1..22: mol_type = other RNA
tgttggttcaagcgtgtagtcg

SEQ ID NO: 66194 - RNA, 20 nt, Synthetic Construct
  source 1..20: mol_type = other RNA
aaaccggaggaaggtgggga

SEQ ID NO: 66195 - RNA, 21 nt, Synthetic Construct
  source 1..21: mol_type = other RNA
acacatgcaagtcgaacggta

SEQ ID NO: 66196 - RNA, 19 nt, Synthetic Construct
  source 1..19: mol_type = other RNA
acctgaagaataagcaccg

SEQ ID NO: 66197 - RNA, 32 nt, Synthetic Construct
  source 1..32: mol_type = other RNA
acggtcctaaggtagcgaaattccttgtcggg

SEQ ID NO: 66198 - RNA, 25 nt, Synthetic Construct
  source 1..25: mol_type = other RNA
atatatcggaacgtgcccagtcgtg

SEQ ID NO: 66199 - RNA, 38 nt, Synthetic Construct; identical to SEQ ID NO: 11817
  source 1..38: mol_type = other RNA

SEQ ID NO: 66200 - RNA, 36 nt, Synthetic Construct; identical to SEQ ID NO: 11035
  source 1..36: mol_type = other RNA

SEQ ID NO: 66201 - RNA, 16 nt, Synthetic Construct
  source 1..16: mol_type = other RNA
gattccgaaagtagtg

SEQ ID NO: 66202 - RNA, 29 nt, Synthetic Construct
  source 1..29: mol_type = other RNA
gttggttcaagcgtgtagtcgtgctcttt

SEQ ID NO: 66203 - RNA, 39 nt, Synthetic Construct; identical to SEQ ID NO: 10211
  source 1..39: mol_type = other RNA

SEQ ID NO: 66204 - RNA, 16 nt, Synthetic Construct
  source 1..16: mol_type = other RNA
tggccgtcgtcagctc

SEQ ID NO: 66205 - RNA, 19 nt, Synthetic Construct
  source 1..19: mol_type = other RNA
tggccgtcgtcagctcgtg

SEQ ID NO: 66206 - RNA, 18 nt, Synthetic Construct
  source 1..18: mol_type = other RNA
gtccggactcaagaggga

SEQ ID NO: 66207 - RNA, 22 nt, Synthetic Construct
  source 1..22: mol_type = other RNA
cggaatcgctagtaatcgcgga

SEQ ID NO: 66208 - RNA, 17 nt, Synthetic Construct
  source 1..17: mol_type = other RNA
gttgacctcggatcagg

SEQ ID NO: 66209 - RNA, 19 nt, Synthetic Construct
  source 1..19: mol_type = other RNA
cgacggcgggggccccggg

SEQ ID NO: 66210 - RNA, 25 nt, Synthetic Construct
  source 1..25: mol_type = other RNA
ggactacatatggttgagggttgta

SEQ ID NO: 66211 - RNA, 17 nt, Synthetic Construct
  source 1..17: mol_type = other RNA
aggtttgagtcggagca

SEQ ID NO: 66212 - RNA, 35 nt, Synthetic Construct; identical to SEQ ID NO: 2452
  source 1..35: mol_type = other RNA

SEQ ID NO: 66213 - RNA, 27 nt, Synthetic Construct
  source 1..27: mol_type = other RNA
cctacccttgacatgccaggaatcctg

SEQ ID NO: 66214 - RNA, 39 nt, Synthetic Construct
  source 1..39: mol_type = other RNA
gaccggagtggacgcacctctggtgtatcggttgtcacg

SEQ ID NO: 66215 - RNA, 33 nt, Synthetic Construct
  source 1..33: mol_type = other RNA
gtaatgtcatagtcgagtagtactaataacccg

SEQ ID NO: 66216 - RNA, 16 nt, Synthetic Construct
  source 1..16: mol_type = other RNA
tatcttggctctcgca

SEQ ID NO: 66217 - RNA, 21 nt, Synthetic Construct
  source 1..21: mol_type = other RNA
cgaacgagacctcagcctgct

SEQ ID NO: 66218 - RNA, 37 nt, Synthetic Construct; identical to SEQ ID NO: 5125
  source 1..37: mol_type = other RNA

SEQ ID NO: 66219 - RNA, 18 nt, Synthetic Construct
  source 1..18: mol_type = other RNA
tggccgggacagagggct

SEQ ID NO: 66220 - RNA, 35 nt, Synthetic Construct; identical to SEQ ID NO: 2615
  source 1..35: mol_type = other RNA

SEQ ID NO: 66221 - RNA, 19 nt, Synthetic Construct
  source 1..19: mol_type = other RNA
gagagcctggacacaggtg

SEQ ID NO: 66222 - RNA, 26 nt, Synthetic Construct
  source 1..26: mol_type = other RNA
agtcgagcaggtacgaaagtaggaca

SEQ ID NO: 66223 - RNA, 18 nt, Synthetic Construct
  source 1..18: mol_type = other RNA
tctaatgagactgccggt

SEQ ID NO: 66224 - RNA, 29 nt, Synthetic Construct
  source 1..29: mol_type = other RNA
ataccgggctctttgagtctggtaattgg

SEQ ID NO: 66225 - RNA, 20 nt, Synthetic Construct
  source 1..20: mol_type = other RNA
aatggccgggacagagggct

SEQ ID NO: 66226 - RNA, 36 nt, Synthetic Construct; identical to SEQ ID NO: 2660
  source 1..36: mol_type = other RNA

SEQ ID NO: 66227 - RNA, 19 nt, Synthetic Construct
  source 1..19: mol_type = other RNA
cagcactctgcaaagacga

SEQ ID NO: 66228 - RNA, 20 nt, Synthetic Construct
  source 1..20: mol_type = other RNA
gaatcgctagtaatcgcgga

SEQ ID NO: 66229 - RNA, 19 nt, Synthetic Construct
  source 1..19: mol_type = other RNA
gcgaaattccttgtcgggt

SEQ ID NO: 66230 - RNA, 20 nt, Synthetic Construct
  source 1..20: mol_type = other RNA
gcgtgcttgactgcgagact

SEQ ID NO: 66231 - RNA, 21 nt, Synthetic Construct
  source 1..21: mol_type = other RNA
ggaggagttcgaaggtacgct

SEQ ID NO: 66232 - RNA, 16 nt, Synthetic Construct
  source 1..16: mol_type = other RNA
atcgagtcgtcctgcg

SEQ ID NO: 66233 - RNA, 20 nt, Synthetic Construct
  source 1..20: mol_type = other RNA
atgtcaactggttgttggga

SEQ ID NO: 66234 - RNA, 18 nt, Synthetic Construct
  source 1..18: mol_type = other RNA
ccggctggaagtttgagg

SEQ ID NO: 66235 - RNA, 18 nt, Synthetic Construct
  source 1..18: mol_type = other RNA
gtccggatcgtagtctgc

SEQ ID NO: 66236 - RNA, 18 nt, Synthetic Construct
  source 1..18: mol_type = other RNA
tggcccttatgggtaggg

SEQ ID NO: 66237 - RNA, 18 nt, Synthetic Construct
  source 1..18: mol_type = other RNA
tggccgtcgtcagctcgt

SEQ ID NO: 66238 - RNA, 18 nt, Synthetic Construct
  source 1..18: mol_type = other RNA
aagtggggttgtgggaat

SEQ ID NO: 66239 - RNA, 18 nt, Synthetic Construct
  source 1..18: mol_type = other RNA
tcagttttgtcaggtaaa

SEQ ID NO: 66240 - RNA, 16 nt, Synthetic Construct
  source 1..16: mol_type = other RNA
agttgaccgcctgggg

SEQ ID NO: 66241 - RNA, 17 nt, Synthetic Construct
  source 1..17: mol_type = other RNA
cacggcccagactccta

SEQ ID NO: 66242 - RNA, 24 nt, Synthetic Construct
  source 1..24: mol_type = other RNA
gcagctaataccgcatacgacctg

SEQ ID NO: 66243 - RNA, 22 nt, Synthetic Construct
  source 1..22: mol_type = other RNA
gcgtggtaggagagcgttctgt

SEQ ID NO: 66244 - RNA, 30 nt, Synthetic Construct
  source 1..30: mol_type = other RNA
gggcaagagcatgtctgcctcagcgtcggt

SEQ ID NO: 66245 - RNA, 17 nt, Synthetic Construct
  source 1..17: mol_type = other RNA
tggccgtcgtcagctcg

SEQ ID NO: 66246 - RNA, 18 nt, Synthetic Construct
  source 1..18: mol_type = other RNA
gaattcaccaagtgttgg

SEQ ID NO: 66247 - RNA, 16 nt, Synthetic Construct
  source 1..16: mol_type = other RNA
cgggagtcagactgca

SEQ ID NO: 66248 - RNA, 39 nt, Synthetic Construct
  source 1..39: mol_type = other RNA
cccctggacctgtactgacgctcatgcacgaaagcgtgg

SEQ ID NO: 66249 - RNA, 32 nt, Synthetic Construct
  source 1..32: mol_type = other RNA
tcaaatgactaagggcttatggtggataccta

SEQ ID NO: 66250 - RNA, 16 nt, Synthetic Construct
  source 1..16: mol_type = other RNA
ctcagtagctcgagga

SEQ ID NO: 66251 - RNA, 16 nt, Synthetic Construct
  source 1..16: mol_type = other RNA
ggccgtcgtcagctcg

SEQ ID NO: 66252 - RNA, 20 nt, Synthetic Construct
  source 1..20: mol_type = other RNA
ggtcccaagggtatggctgt

SEQ ID NO: 66253 - RNA, 28 nt, Synthetic Construct
  source 1..28: mol_type = other RNA
gtaatggcgggaactctggacagactgc

SEQ ID NO: 66254 - RNA, 22 nt, Synthetic Construct
  source 1..22: mol_type = other RNA
ttggaagtggggttgtgggaat

SEQ ID NO: 66255 - RNA, 20 nt, Synthetic Construct
  source 1..20: mol_type = other RNA
aaacagtcaggatgttggct

SEQ ID NO: 66256 - RNA, 26 nt, Synthetic Construct
  source 1..26: mol_type = other RNA
caggggttcgaatcccctaggggacg

SEQ ID NO: 66257 - RNA, 26 nt, Synthetic Construct
  source 1..26: mol_type = other RNA
cctcgcgcgattggagcggccgatat

SEQ ID NO: 66258 - RNA, 25 nt, Synthetic Construct
  source 1..25: mol_type = other RNA
ctcactgatcgagtcgtcctgcgcg

SEQ ID NO: 66259 - RNA, 19 nt, Synthetic Construct
  source 1..19: mol_type = other RNA
gaagttgaccgcctgggga

SEQ ID NO: 66260 - RNA, 37 nt, Synthetic Construct
  source 1..37: mol_type = other RNA
gtcgacgtatagggtgtgactcctgcccggtgctgga

SEQ ID NO: 66261 - RNA, 26 nt, Synthetic Construct
  source 1..26: mol_type = other RNA
tcactgatcgagtcgtcctgcgcgga

SEQ ID NO: 66262 - RNA, 18 nt, Synthetic Construct
  source 1..18: mol_type = other RNA
tcccagaaacccggtcgt

SEQ ID NO: 66263 - RNA, 17 nt, Synthetic Construct
  source 1..17: mol_type = other RNA
tctgcttgagcgccgct

SEQ ID NO: 66264 - RNA, 18 nt, Synthetic Construct
  source 1..18: mol_type = other RNA
agcggtggatgatgtggt

SEQ ID NO: 66265 - RNA, 25 nt, Synthetic Construct
  source 1..25: mol_type = other RNA
agctcactgatcgagtcgtcctgcg

SEQ ID NO: 66266 - RNA, 27 nt, Synthetic Construct
  source 1..27: mol_type = other RNA
gacttaccaaacctatgcaaactccga

SEQ ID NO: 66267 - RNA, 24 nt, Synthetic Construct
  source 1..24: mol_type = other RNA
gctcactgatcgagtcgtcctgcg

SEQ ID NO: 66268 - RNA, 28 nt, Synthetic Construct
  source 1..28: mol_type = other RNA
gctttacattggactttgaacagatctg

SEQ ID NO: 66269 - RNA, 36 nt, Synthetic Construct
  source 1..36: mol_type = other RNA
gtcgacgtatagggtgtgactcctgcccggtgctgg

SEQ ID NO: 66270 - RNA, 28 nt, Synthetic Construct
  source 1..28: mol_type = other RNA
gttggttcaagcgtgtagtcgtgctctt

SEQ ID NO: 66271 - RNA, 36 nt, Synthetic Construct
  source 1..36: mol_type = other RNA
tatcggaacgtgcccagtcgtgggggataactgctc

SEQ ID NO: 66272 - RNA, 24 nt, Synthetic Construct
  source 1..24: mol_type = other RNA
tcactgatcgagtcgtcctgcgcg

SEQ ID NO: 66273 - RNA, 16 nt, Synthetic Construct
  source 1..16: mol_type = other RNA
tcagtagctcgaggaa

SEQ ID NO: 66274 - RNA, 17 nt, Synthetic Construct
  source 1..17: mol_type = other RNA
gcgaaattccttgtcgg

SEQ ID NO: 66275 - RNA, 19 nt, Synthetic Construct
  source 1..19: mol_type = other RNA
aaaccggaggaaggtgggg

SEQ ID NO: 66276 - RNA, 19 nt, Synthetic Construct
  source 1..19: mol_type = other RNA
acagatcgaggacttgaat

SEQ ID NO: 66277 - RNA, 31 nt, Synthetic Construct
  source 1..31: mol_type = other RNA
cctgggaactgcctttgtgactgcatggcta

SEQ ID NO: 66278 - RNA, 18 nt, Synthetic Construct
  source 1..18: mol_type = other RNA
gccatgccgcgtgcggga

SEQ ID NO: 66279 - RNA, 17 nt, Synthetic Construct
  source 1..17: mol_type = other RNA
aagttgaccgcctgggg

SEQ ID NO: 66280 - RNA, 21 nt, Synthetic Construct
  source 1..21: mol_type = other RNA
agccatcatttaaagaaagcg

SEQ ID NO: 66281 - RNA, 41 nt, Synthetic Construct
  source 1..41: mol_type = other RNA
aggaccggagtggacgcacctctggtgtatcggttgtcacg

SEQ ID NO: 66282 - RNA, 21 nt, Synthetic Construct
  source 1..21: mol_type = other RNA
cacgtcatacaatggccggga

SEQ ID NO: 66283 - RNA, 18 nt, Synthetic Construct
  source 1..18: mol_type = other RNA
cctgaagaataagcaccg

SEQ ID NO: 66284 - RNA, 21 nt, Synthetic Construct
  source 1..21: mol_type = other RNA
cggttatgcaagacagaggtg

SEQ ID NO: 66285 - RNA, 24 nt, Synthetic Construct
  source 1..24: mol_type = other RNA
ctcactgatcgagtcgtcctgcgc

SEQ ID NO: 66286 - RNA, 38 nt, Synthetic Construct
  source 1..38: mol_type = other RNA
ctcgactgcgtgaagtcggaatcgctagtaatcgcgga

SEQ ID NO: 66287 - RNA, 16 nt, Synthetic Construct
  source 1..16: mol_type = other RNA
gaagttgaccgcctgg

SEQ ID NO: 66288 - RNA, 19 nt, Synthetic Construct
  source 1..19: mol_type = other RNA
gctattgacgaccgtaccg

SEQ ID NO: 66289 - RNA, 17 nt, Synthetic Construct
  source 1..17: mol_type = other RNA
ggcccttatgggtaggg

SEQ ID NO: 66290 - RNA, 23 nt, Synthetic Construct
  source 1..23: mol_type = other RNA
gtctttgttcgattccgttgagt

SEQ ID NO: 66291 - RNA, 24 nt, Synthetic Construct
  source 1..24: mol_type = other RNA
tcggctcatctcatcctggggctg

SEQ ID NO: 66292 - RNA, 19 nt, Synthetic Construct
  source 1..19: mol_type = other RNA
tgtcaactggttgttggga

SEQ ID NO: 66293 - RNA, 34 nt, Synthetic Construct
  source 1..34: mol_type = other RNA
cggaggagttcgaaggtacgctagttacggtcgg

SEQ ID NO: 66294 - RNA, 17 nt, Synthetic Construct
  source 1..17: mol_type = other RNA
agtttttgggttccggg

SEQ ID NO: 66295 - RNA, 19 nt, Synthetic Construct
  source 1..19: mol_type = other RNA
ttcgtatttcattgtcaga

SEQ ID NO: 66296 - RNA, 17 nt, Synthetic Construct
  source 1..17: mol_type = other RNA
aagcggtggatgatgtg

SEQ ID NO: 66297 - RNA, 16 nt, Synthetic Construct
  source 1..16: mol_type = other RNA
accggaggaaggtggg

SEQ ID NO: 66298 - RNA, 23 nt, Synthetic Construct
  source 1..23: mol_type = other RNA
aggtagcgaaattccttgtcggg

SEQ ID NO: 66299 - RNA, 31 nt, Synthetic Construct; identical to SEQ ID NO: 5506
  source 1..31: mol_type = other RNA

SEQ ID NO: 66300 - RNA, 22 nt, Synthetic Construct
  source 1..22: mol_type = other RNA
tgcctttgtgactgcatggcta

SEQ ID NO: 66301 - RNA, 22 nt, Synthetic Construct
  source 1..22: mol_type = other RNA
tgtcaactggttgttgggaggg

SEQ ID NO: 66302 - RNA, 32 nt, Synthetic Construct
  source 1..32: mol_type = other RNA
ttctaaggcgcttgagagaactctggagaagg

SEQ ID NO: 66303 - RNA, 38 nt, Synthetic Construct
  source 1..38: mol_type = other RNA
ttggacaatgggcgcaagcctgatccagccatgccgcg

SEQ ID NO: 66304 - RNA, 26 nt, Synthetic Construct
  source 1..26: mol_type = other RNA
tacctggttgatcctgccagtagtca

SEQ ID NO: 66305 - RNA, 43 nt, Synthetic Construct
  source 1..43: mol_type = other RNA
tgctacgatccgctgagattcagcccgtgttcggaagattttc

SEQ ID NO: 66306 - RNA, 22 nt, Synthetic Construct
  source 1..22: mol_type = other RNA
gcactctaatgagactgccggt

SEQ ID NO: 66307 - RNA, 43 nt, Synthetic Construct
  source 1..43: mol_type = other RNA
agtcgagcaggtacgaaagtaggacaaagtgatccggtggttc

SEQ ID NO: 66308 - RNA, 23 nt, Synthetic Construct
  source 1..23: mol_type = other RNA
gggcactctaatgagactgccgg

SEQ ID NO: 66309 - RNA, 22 nt, Synthetic Construct
  source 1..22: mol_type = other RNA
gcatgcttatctgagtgtctgt

SEQ ID NO: 66310 - RNA, 33 nt, Synthetic Construct
  source 1..33: mol_type = other RNA
accggaggaaggtggggatgacgtcaggtcatc

SEQ ID NO: 66311 - RNA, 40 nt, Synthetic Construct
  source 1..40: mol_type = other RNA
cccctggacctgtactgacgctcatgcacgaaagcgtggg

SEQ ID NO: 66312 - RNA, 17 nt, Synthetic Construct
  source 1..17: mol_type = other RNA
gagctgtggataggggt

SEQ ID NO: 66313 - RNA, 19 nt, Synthetic Construct
  source 1..19: mol_type = other RNA
agcgaaattccttgtcggg

SEQ ID NO: 66314 - RNA, 21 nt, Synthetic Construct
  source 1..21: mol_type = other RNA
cggaatcgctagtaatcgcgg

SEQ ID NO: 66315 - RNA, 26 nt, Synthetic Construct
  source 1..26: mol_type = other RNA
gccccgtatgagaaatgcagattgtg

SEQ ID NO: 66316 - RNA, 20 nt, Synthetic Construct
  source 1..20: mol_type = other RNA
ggagtggacgcacctctggt

SEQ ID NO: 66317 - RNA, 32 nt, Synthetic Construct
  source 1..32: mol_type = other RNA
ggtctgtagctcagtcggttagagcaccgtct

SEQ ID NO: 66318 - RNA, 19 nt, Synthetic Construct
  source 1..19: mol_type = other RNA
tgaagttgaccgcctgggg

SEQ ID NO: 66319 - RNA, 22 nt, Synthetic Construct
  source 1..22: mol_type = other RNA
tcactgatcgagtcgtcctgcg

SEQ ID NO: 66320 - RNA, 18 nt, Synthetic Construct
  source 1..18: mol_type = other RNA
ggtgcaagcgttaatcgg

SEQ ID NO: 66321 - RNA, 16 nt, Synthetic Construct
  source 1..16: mol_type = other RNA
gtttttgggttccggg

SEQ ID NO: 66322 - RNA, 22 nt, Synthetic Construct
  source 1..22: mol_type = other RNA
actgatcgagtcgtcctgcgcg

SEQ ID NO: 66323 - RNA, 37 nt, Synthetic Construct
  source 1..37: mol_type = other RNA
atatcggaacgtgcccagtcgtgggggataactgctc

SEQ ID NO: 66324 - RNA, 24 nt, Synthetic Construct
  source 1..24: mol_type = other RNA
cctcgcgcgattggagcggccgat

SEQ ID NO: 66325 - RNA, 20 nt, Synthetic Construct
  source 1..20: mol_type = other RNA
cctgtctgaatatgggggga

SEQ ID NO: 66326 - RNA, 24 nt, Synthetic Construct
  source 1..24: mol_type = other RNA
gcagacgaagtgagtgataccctg

SEQ ID NO: 66327 - RNA, 19 nt, Synthetic Construct
  source 1..19: mol_type = other RNA
gcgtagggtgagtcggccc

SEQ ID NO: 66328 - RNA, 21 nt, Synthetic Construct
  source 1..21: mol_type = other RNA
tgtagataagggaagtcggca

SEQ ID NO: 66329 - RNA, 41 nt, Synthetic Construct
  source 1..41: mol_type = other RNA
cccctggacctgtactgacgctcatgcacgaaagcgtgggg

SEQ ID NO: 66330 - RNA, 30 nt, Synthetic Construct
  source 1..30: mol_type = other RNA
ccgggatggggacagtgtatggtgggcagt

SEQ ID NO: 66331 - RNA, 26 nt, Synthetic Construct
  source 1..26: mol_type = other RNA
tagatgaggcgtgataacgagtctgc

SEQ ID NO: 66332 - RNA, 16 nt, Synthetic Construct
  source 1..16: mol_type = other RNA
aggtcatcattatctg

SEQ ID NO: 66333 - RNA, 28 nt, Synthetic Construct
  source 1..28: mol_type = other RNA
cgagcgcaacccttgtcattagttgcta

SEQ ID NO: 66334 - RNA, 18 nt, Synthetic Construct
  source 1..18: mol_type = other RNA
agattccgaaagtagtgg

SEQ ID NO: 66335 - RNA, 17 nt, Synthetic Construct
  source 1..17: mol_type = other RNA
tagagtagggcgggaca

SEQ ID NO: 66336 - RNA, 37 nt, Synthetic Construct; identical to SEQ ID NO: 2482
  source 1..37: mol_type = other RNA

SEQ ID NO: 66337 - RNA, 16 nt, Synthetic Construct
  source 1..16: mol_type = other RNA
cagtgtgaatcggcgc

SEQ ID NO: 66338 - RNA, 30 nt, Synthetic Construct
  source 1..30: mol_type = other RNA
cgagcgcaacccttgtcattagttgctacg

SEQ ID NO: 66339 - RNA, 23 nt, Synthetic Construct
  source 1..23: mol_type = other RNA
gatgaggcgtgataacgagtctg

SEQ ID NO: 66340 - RNA, 37 nt, Synthetic Construct
  source 1..37: mol_type = other RNA
gcctttgtgactgcatggctagagtacggtagagggg

SEQ ID NO: 66341 - RNA, 28 nt, Synthetic Construct
  source 1..28: mol_type = other RNA
gtcgacgtatagggtgtgactcctgccc

SEQ ID NO: 66342 - RNA, 24 nt, Synthetic Construct
  source 1..24: mol_type = other RNA
ttgggtggtaaattccatctaagg

SEQ ID NO: 66343 - RNA, 30 nt, Synthetic Construct
  source 1..30: mol_type = other RNA
tgtatggaccacacatggttgagggtcgtt

SEQ ID NO: 66344 - RNA, 27 nt, Synthetic Construct
  source 1..27: mol_type = other RNA
cgccatttaaagaggtacgtgagctgg

SEQ ID NO: 66345 - RNA, 25 nt, Synthetic Construct
  source 1..25: mol_type = other RNA
gacttaccaaacctatgcaaactcc

SEQ ID NO: 66346 - RNA, 22 nt, Synthetic Construct
  source 1..22: mol_type = other RNA
gctttacattggactttgaaca

SEQ ID NO: 66347 - RNA, 18 nt, Synthetic Construct
  source 1..18: mol_type = other RNA
atcgctagtaatcgcgga

SEQ ID NO: 66348 - RNA, 25 nt, Synthetic Construct
  source 1..25: mol_type = other RNA
ggcgcttgagagaactctggagaag

SEQ ID NO: 66349 - RNA, 17 nt, Synthetic Construct
  source 1..17: mol_type = other RNA
gtaagtgggagacgttg

SEQ ID NO: 66350 - RNA, 21 nt, Synthetic Construct
  source 1..21: mol_type = other RNA
gaggactctggcgggactgcc

SEQ ID NO: 66351 - RNA, 18 nt, Synthetic Construct
  source 1..18: mol_type = other RNA
ggagaagggtttcgtgtg

SEQ ID NO: 66352 - RNA, 29 nt, Synthetic Construct
  source 1..29: mol_type = other RNA
gtccggccgggcactctagagagactgcc

SEQ ID NO: 66353 - RNA, 29 nt, Synthetic Construct
  source 1..29: mol_type = other RNA
gtccggccgggcactctagggagactgcc

SEQ ID NO: 66354 - RNA, 29 nt, Synthetic Construct
  source 1..29: mol_type = other RNA
tcttgtgagaagaacagcctggaaagact

SEQ ID NO: 66355 - RNA, 28 nt, Synthetic Construct
  source 1..28: mol_type = other RNA
ggcagggttcgtgactggggtgaagtcg

SEQ ID NO: 66356 - RNA, 19 nt, Synthetic Construct
  source 1..19: mol_type = other RNA
gtactgacgctcatgcacg

SEQ ID NO: 66357 - RNA, 41 nt, Synthetic Construct; identical to SEQ ID NO: 2441
  source 1..41: mol_type = other RNA

SEQ ID NO: 66358 - RNA, 17 nt, Synthetic Construct
  source 1..17: mol_type = other RNA
agattccgaaagtagtg

SEQ ID NO: 66359 - RNA, 36 nt, Synthetic Construct
  source 1..36: mol_type = other RNA
agctcttgactgaagtcccagtaaacggcggccgta

SEQ ID NO: 66360 - RNA, 16 nt, Synthetic Construct
  source 1..16: mol_type = other RNA
gatctgtagctggtct

SEQ ID NO: 66361 - RNA, 19 nt, Synthetic Construct
  source 1..19: mol_type = other RNA
gggtgcaagcgttaatcgg

SEQ ID NO: 66362 - RNA, 28 nt, Synthetic Construct
  source 1..28: mol_type = other RNA
gggtctgtagctcagttggttagagcac

SEQ ID NO: 66363 - RNA, 16 nt, Synthetic Construct
  source 1..16: mol_type = other RNA
ttgtgttggtcttcgg

SEQ ID NO: 66364 - RNA, 20 nt, Synthetic Construct
  source 1..20: mol_type = other RNA
gacctcgcgcgattggagcg

SEQ ID NO: 66365 - RNA, 18 nt, Synthetic Construct
  source 1..18: mol_type = other RNA
gatatgcggaggaacacc

SEQ ID NO: 66366 - RNA, 38 nt, Synthetic Construct
  source 1..38: mol_type = other RNA
tccggagagcttagatgaggcgtgataacgagtctgct

SEQ ID NO: 66367 - RNA, 24 nt, Synthetic Construct
  source 1..24: mol_type = other RNA
tgcgtagatatgcggaggaacacc

SEQ ID NO: 66368 - RNA, 16 nt, Synthetic Construct
  source 1..16: mol_type = other RNA
ctaatgagactgccgg

SEQ ID NO: 66369 - RNA, 22 nt, Synthetic Construct
  source 1..22: mol_type = other RNA
ctgccgaagctgtgggatgtcc

SEQ ID NO: 66370 - RNA, 20 nt, Synthetic Construct
  source 1..20: mol_type = other RNA
gcctcaagtattacctgcgg

SEQ ID NO: 66371 - RNA, 27 nt, Synthetic Construct
  source 1..27: mol_type = other RNA
gctttacattggactttgaacagatct

SEQ ID NO: 66372 - RNA, 22 nt, Synthetic Construct
  source 1..22: mol_type = other RNA
tctttgttcgattccgttgagt

SEQ ID NO: 66373 - RNA, 27 nt, Synthetic Construct
  source 1..27: mol_type = other RNA
tgcccagtcgtgggggataactgctcg

SEQ ID NO: 66374 - RNA, 21 nt, Synthetic Construct
  source 1..21: mol_type = other RNA
gttgacctcggatcaggtagg

SEQ ID NO: 66375 - RNA, 20 nt, Synthetic Construct
  source 1..20: mol_type = other RNA
accgtagtaattctagagct

SEQ ID NO: 66376 - RNA, 21 nt, Synthetic Construct
  source 1..21: mol_type = other RNA
gctctttcttgattctatggg

SEQ ID NO: 66377 - RNA, 36 nt, Synthetic Construct
  source 1..36: mol_type = other RNA
gtccacgccctaaacgatgtcaactggttgttggga

SEQ ID NO: 66378 - RNA, 24 nt, Synthetic Construct
  source 1..24: mol_type = other RNA
acggaggagttcgaaggtacgcta

SEQ ID NO: 66379 - RNA, 28 nt, Synthetic Construct
  source 1..28: mol_type = other RNA
gtggcattgccgagtagctaagtgcgga

SEQ ID NO: 66380 - RNA, 41 nt, Synthetic Construct
  source 1..41: mol_type = other RNA
accggaggaaggtggggatgacgtcaggtcatcatggccct

SEQ ID NO: 66381 - RNA, 21 nt, Synthetic Construct
  source 1..21: mol_type = other RNA
ataggctgtgggtgtaagtgc

SEQ ID NO: 66382 - RNA, 32 nt, Synthetic Construct
  source 1..32: mol_type = other RNA
ccgggcaagagcatgtctggctcagcgtcggt

SEQ ID NO: 66383 - RNA, 25 nt, Synthetic Construct
  source 1..25: mol_type = other RNA
cccccttccccctccgcggggtcgg

SEQ ID NO: 66384 - RNA, 19 nt, Synthetic Construct
  source 1..19: mol_type = other RNA
gcggctggatcacctcctt

SEQ ID NO: 66385 - RNA, 24 nt, Synthetic Construct
  source 1..24: mol_type = other RNA
ggcagggttcgtgactggggtgaa

SEQ ID NO: 66386 - RNA, 18 nt, Synthetic Construct
  source 1..18: mol_type = other RNA
aagcggtggatgatgtgg

SEQ ID NO: 66387 - RNA, 27 nt, Synthetic Construct
  source 1..27: mol_type = other RNA
atatcggaacgtgcccagtcgtggggg

SEQ ID NO: 66388 - RNA, 23 nt, Synthetic Construct
  source 1..23: mol_type = other RNA
agtcgagcaggtacgaaagtagg

SEQ ID NO: 66389 - RNA, 21 nt, Synthetic Construct
  source 1..21: mol_type = other RNA
tcgtcaaacttgggtataggg

SEQ ID NO: 66390 - RNA, 18 nt, Synthetic Construct
  source 1..18: mol_type = other RNA
ttgccgaaactgtgtgat

SEQ ID NO: 66391 - RNA, 24 nt, Synthetic Construct
  source 1..24: mol_type = other RNA
gactacatatggttgagggttgta

SEQ ID NO: 66392 - RNA, 20 nt, Synthetic Construct
  source 1..20: mol_type = other RNA
ggctgtcggcggtctgcccg

SEQ ID NO: 66393 - RNA, 26 nt, Synthetic Construct
  source 1..26: mol_type = other RNA
tggactacatatggttgagggttgta

SEQ ID NO: 66394 - RNA, 21 nt, Synthetic Construct
  source 1..21: mol_type = other RNA
ttgggacccgaaagatggtga

SEQ ID NO: 66395 - RNA, 21 nt, Synthetic Construct
  source 1..21: mol_type = other RNA
caaaccggaggaaggtgggga

SEQ ID NO: 66396 - RNA, 19 nt, Synthetic Construct
  source 1..19: mol_type = other RNA
ctgatcgagtcgtcctgcg

SEQ ID NO: 66397 - RNA, 28 nt, Synthetic Construct
  source 1..28: mol_type = other RNA
gcgggttctgccagaagtagttagccta

SEQ ID NO: 66398 - RNA, 21 nt, Synthetic Construct
  source 1..21: mol_type = other RNA
ggtgctgcatggccgtcgtca

SEQ ID NO: 66399 - RNA, 18 nt, Synthetic Construct
  source 1..18: mol_type = other RNA
gtccccttcgtctagagg

SEQ ID NO: 66400 - RNA, 17 nt, Synthetic Construct
  source 1..17: mol_type = other RNA
tcagtagctcgaggaaa

SEQ ID NO: 66401 - RNA, 17 nt, Synthetic Construct
  source 1..17: mol_type = other RNA
agtggggttgtgggaat

SEQ ID NO: 66402 - RNA, 19 nt, Synthetic Construct
  source 1..19: mol_type = other RNA
cagccatgccgcgtgcggg

SEQ ID NO: 66403 - RNA, 27 nt, Synthetic Construct
  source 1..27: mol_type = other RNA
gacctcgcgcgattggagcggccgata

SEQ ID NO: 66404 - RNA, 19 nt, Synthetic Construct
  source 1..19: mol_type = other RNA
gtcgacgtatagggtgtga

SEQ ID NO: 66405 - RNA, 22 nt, Synthetic Construct
  source 1..22: mol_type = other RNA
taccgcagagtacagcttggga

SEQ ID NO: 66406 - RNA, 16 nt, Synthetic Construct
  source 1..16: mol_type = other RNA
agcaagtcgaacggta

SEQ ID NO: 66407 - RNA, 36 nt, Synthetic Construct
  source 1..36: mol_type = other RNA
cgaagtgggaaggctaaaacagtcaggatgttggct

SEQ ID NO: 66408 - RNA, 20 nt, Synthetic Construct
  source 1..20: mol_type = other RNA
cggttatgcaagacagaggt

SEQ ID NO: 66409 - RNA, 29 nt, Synthetic Construct
  source 1..29: mol_type = other RNA
taaggcgcttgagagaactctggagaagg

SEQ ID NO: 66410 - RNA, 29 nt, Synthetic Construct
  source 1..29: mol_type = other RNA
taggtagtgcctcaagtattacctgcggg

SEQ ID NO: 66411 - RNA, 19 nt, Synthetic Construct
  source 1..19: mol_type = other RNA
cctgtaccgatcaatagtg

SEQ ID NO: 66412 - RNA, 32 nt, Synthetic Construct
  source 1..32: mol_type = other RNA
gcgggttctgccagaagtagttagcctaaccg

SEQ ID NO: 66413 - RNA, 32 nt, Synthetic Construct
  source 1..32: mol_type = other RNA
gcttccgtgaccacgcctgtctgagggtcggt

SEQ ID NO: 66414 - RNA, 26 nt, Synthetic Construct
  source 1..26: mol_type = other RNA
gggatggaagatggcgagaaaagctg

SEQ ID NO: 66415 - RNA, 19 nt, Synthetic Construct
  source 1..19: mol_type = other RNA
aatggccgggacagagggc

SEQ ID NO: 66416 - RNA, 30 nt, Synthetic Construct
  source 1..30: mol_type = other RNA
ccggaggaaggtggggatgacgtcaggtca

SEQ ID NO: 66417 - RNA, 19 nt, Synthetic Construct
  source 1..19: mol_type = other RNA
gacacggcccagactccta

SEQ ID NO: 66418 - RNA, 28 nt, Synthetic Construct
  source 1..28: mol_type = other RNA
gatgtcggctcatctcatcctggggctg

SEQ ID NO: 66419 - RNA, 17 nt, Synthetic Construct
  source 1..17: mol_type = other RNA
gcggtggatgatgtggt

SEQ ID NO: 66420 - RNA, 37 nt, Synthetic Construct; identical to SEQ ID NO: 2607
  source 1..37: mol_type = other RNA

SEQ ID NO: 66421 - RNA, 16 nt, Synthetic Construct
  source 1..16: mol_type = other RNA
tgcacgaaagcgtggg

SEQ ID NO: 66422 - RNA, 27 nt, Synthetic Construct
  source 1..27: mol_type = other RNA
ttagtgacgcgcatgaatggattaacg

SEQ ID NO: 66423 - RNA, 27 nt, Synthetic Construct
  source 1..27: mol_type = other RNA
aggcgcttgagagaactctggagaagg

SEQ ID NO: 66424 - RNA, 26 nt, Synthetic Construct
  source 1..26: mol_type = other RNA
gcataagcgtgcttgactgcgagact

SEQ ID NO: 66425 - RNA, 28 nt, Synthetic Construct
  source 1..28: mol_type = other RNA
tgttggttcaagcgtgtagtcgtgctct

SEQ ID NO: 66426 - RNA, 18 nt, Synthetic Construct
  source 1..18: mol_type = other RNA
acgatctgtagctggtct

SEQ ID NO: 66427 - RNA, 18 nt, Synthetic Construct
  source 1..18: mol_type = other RNA
agccatgccgcgtgcggg

SEQ ID NO: 66428 - RNA, 16 nt, Synthetic Construct
  source 1..16: mol_type = other RNA
attccgaaagtagtgg

SEQ ID NO: 66429 - RNA, 19 nt, Synthetic Construct
  source 1..19: mol_type = other RNA
cccagtaaacggcggccgt

SEQ ID NO: 66430 - RNA, 20 nt, Synthetic Construct
  source 1..20: mol_type = other RNA
cggaatcgctagtaatcgcg

SEQ ID NO: 66431 - RNA, 18 nt, Synthetic Construct
  source 1..18: mol_type = other RNA
ctgtaccgatcaatagtg

SEQ ID NO: 66432 - RNA, 20 nt, Synthetic Construct
  source 1..20: mol_type = other RNA
ctgtttaggctagggggtca

SEQ ID NO: 66433 - RNA, 27 nt, Synthetic Construct
  source 1..27: mol_type = other RNA
gcataagcgtgcttgactgcgagactg

SEQ ID NO: 66434 - RNA, 17 nt, Synthetic Construct
  source 1..17: mol_type = other RNA
tgcgtagatatgcggag

SEQ ID NO: 66435 - RNA, 32 nt, Synthetic Construct
  source 1..32: mol_type = other RNA
atcccctggacctgtactgacgctcatgcacg

SEQ ID NO: 66436 - RNA, 24 nt, Synthetic Construct
  source 1..24: mol_type = other RNA
gagagcctggacacaggtgctgca

SEQ ID NO: 66437 - RNA, 19 nt, Synthetic Construct
  source 1..19: mol_type = other RNA
ttcgacctgagctcaggca

SEQ ID NO: 66438 - RNA, 25 nt, Synthetic Construct
  source 1..25: mol_type = other RNA
agagtcgaacctgacagtatggagc

SEQ ID NO: 66439 - RNA, 32 nt, Synthetic Construct
  source 1..32: mol_type = other RNA
catgttacggcatgggtggggttgtaggacca

SEQ ID NO: 66440 - RNA, 19 nt, Synthetic Construct
  source 1..19: mol_type = other RNA
gatactggcgtccttgagt

SEQ ID NO: 66441 - RNA, 29 nt, Synthetic Construct
  source 1..29: mol_type = other RNA
gtaatgctgaggactctggcgggactgcc

SEQ ID NO: 66442 - RNA, 16 nt, Synthetic Construct
  source 1..16: mol_type = other RNA
ccgcttttgtcaggga

SEQ ID NO: 66443 - RNA, 19 nt, Synthetic Construct
  source 1..19: mol_type = other RNA
ttgccgaaactgtgtgata

SEQ ID NO: 66444 - RNA, 32 nt, Synthetic Construct; identical to SEQ ID NO: 4734
  source 1..32: mol_type = other RNA

SEQ ID NO: 66445 - RNA, 38 nt, Synthetic Construct
  source 1..38: mol_type = other RNA
atccggagagcttagatgaggcgtgataacgagtctgc

SEQ ID NO: 66446 - RNA, 16 nt, Synthetic Construct
  source 1..16: mol_type = other RNA
cgagtggcgaacgggt

SEQ ID NO: 66447 - RNA, 28 nt, Synthetic Construct
  source 1..28: mol_type = other RNA
cgccatttaaagaggtacgtgagctggg

SEQ ID NO: 66448 - RNA, 18 nt, Synthetic Construct
  source 1..18: mol_type = other RNA
gaggaaggagaagtcgta

SEQ ID NO: 66449 - RNA, 19 nt, Synthetic Construct
  source 1..19: mol_type = other RNA
ggggagtttggctggggcg

SEQ ID NO: 66450 - RNA, 19 nt, Synthetic Construct
  source 1..19: mol_type = other RNA
ataggtcgagggcttgacc

SEQ ID NO: 66451 - RNA, 17 nt, Synthetic Construct
  source 1..17: mol_type = other RNA
tccccgcggaaagacgg

SEQ ID NO: 66452 - RNA, 20 nt, Synthetic Construct
  source 1..20: mol_type = other RNA
atgtctgcctcagcgtcggt

SEQ ID NO: 66453 - RNA, 16 nt, Synthetic Construct
  source 1..16: mol_type = other RNA
cagtagctcgaggaaa

SEQ ID NO: 66454 - RNA, 17 nt, Synthetic Construct
  source 1..17: mol_type = other RNA
cctgcgggggtagagca

SEQ ID NO: 66455 - RNA, 21 nt, Synthetic Construct
  source 1..21: mol_type = other RNA
ctgatcgagtcgtcctgcgcg

SEQ ID NO: 66456 - RNA, 17 nt, Synthetic Construct
  source 1..17: mol_type = other RNA
gagtcgtcctgcgcgga

SEQ ID NO: 66457 - RNA, 20 nt, Synthetic Construct
  source 1..20: mol_type = other RNA
gattgaacgctggcggcatg

SEQ ID NO: 66458 - RNA, 18 nt, Synthetic Construct
  source 1..18: mol_type = other RNA
gcgtagggtgagtcggcc

SEQ ID NO: 66459 - RNA, 17 nt, Synthetic Construct
  source 1..17: mol_type = other RNA
tcgagtcgtcctgcgcg

SEQ ID NO: 66460 - RNA, 24 nt, Synthetic Construct
  source 1..24: mol_type = other RNA
tgcgtggtaggagagcgttctgta

SEQ ID NO: 66461 - RNA, 21 nt, Synthetic Construct
  source 1..21: mol_type = other RNA
tgtcaactggttgttgggagg

SEQ ID NO: 66462 - RNA, 27 nt, Synthetic Construct
  source 1..27: mol_type = other RNA
aagcggtggatgatgtggtttaattcg

SEQ ID NO: 66463 - RNA, 20 nt, Synthetic Construct
  source 1..20: mol_type = other RNA
ggaatcgctagtaatcgcgg

SEQ ID NO: 66464 - RNA, 22 nt, Synthetic Construct
  source 1..22: mol_type = other RNA
tgccgaagctatgggatttgtt

SEQ ID NO: 66465 - RNA, 17 nt, Synthetic Construct
  source 1..17: mol_type = other RNA
attgatcttcaacgagg

SEQ ID NO: 66466 - RNA, 16 nt, Synthetic Construct
  source 1..16: mol_type = other RNA
ggcaagacgccggggt

SEQ ID NO: 66467 - RNA, 18 nt, Synthetic Construct
  source 1..18: mol_type = other RNA
gtctgcttgagcgccgct

SEQ ID NO: 66468 - RNA, 16 nt, Synthetic Construct
  source 1..16: mol_type = other RNA
tacagggggataacag

SEQ ID NO: 66469 - RNA, 37 nt, Synthetic Construct
  source 1..37: mol_type = other RNA
acgaagtgggaaggctaaaacagtcaggatgttggct

SEQ ID NO: 66470 - RNA, 26 nt, Synthetic Construct
  source 1..26: mol_type = other RNA
atcggaacgtgcccagtcgtggggga

SEQ ID NO: 66471 - RNA, 26 nt, Synthetic Construct
  source 1..26: mol_type = other RNA
agagcactgtttaggctagggggtca

SEQ ID NO: 66472 - RNA, 21 nt, Synthetic Construct
  source 1..21: mol_type = other RNA
atcctgtctgaatatgggggg

SEQ ID NO: 66473 - RNA, 23 nt, Synthetic Construct
  source 1..23: mol_type = other RNA
atgtcaactggttgttgggaggg

SEQ ID NO: 66474 - RNA, 16 nt, Synthetic Construct
  source 1..16: mol_type = other RNA
cggtcccaagggtatg

SEQ ID NO: 66475 - RNA, 38 nt, Synthetic Construct
  source 1..38: mol_type = other RNA
gtccggatcgtagtctgcaactcgactgcgtgaagtcg

SEQ ID NO: 66476 - RNA, 26 nt, Synthetic Construct
  source 1..26: mol_type = other RNA
atagtctttgttcgattccgttgagt

SEQ ID NO: 66477 - RNA, 19 nt, Synthetic Construct
  source 1..19: mol_type = other RNA
ccgcagagtacagcttggg

SEQ ID NO: 66478 - RNA, 28 nt, Synthetic Construct
  source 1..28: mol_type = other RNA
gctcactgatcgagtcgtcctgcgcgga

SEQ ID NO: 66479 - RNA, 22 nt, Synthetic Construct
  source 1..22: mol_type = other RNA
agcgtgcttgactgcgagactg

SEQ ID NO: 66480 - RNA, 25 nt, Synthetic Construct
  source 1..25: mol_type = other RNA
agtcggaatcgctagtaatcgcgga

SEQ ID NO: 66481 - RNA, 19 nt, Synthetic Construct
  source 1..19: mol_type = other RNA
agttttcggattgcggcga

SEQ ID NO: 66482 - RNA, 22 nt, Synthetic Construct
  source 1..22: mol_type = other RNA
atcctgtctgaatatgggggga

SEQ ID NO: 66483 - RNA, 16 nt, Synthetic Construct
  source 1..16: mol_type = other RNA
atgcaagtcgaacggt

SEQ ID NO: 66484 - RNA, 28 nt, Synthetic Construct
  source 1..28: mol_type = other RNA
gggatggggacagtgtatggtgggcagt

SEQ ID NO: 66485 - RNA, 24 nt, Synthetic Construct
  source 1..24: mol_type = other RNA
ggttgtaaaccgcttttgtcaggg

SEQ ID NO: 66486 - RNA, 26 nt, Synthetic Construct
  source 1..26: mol_type = other RNA
tagctcactgatcgagtcgtcctgcg

SEQ ID NO: 66487 - RNA, 21 nt, Synthetic Construct
  source 1..21: mol_type = other RNA
tcctgtctgaatatgggggga

SEQ ID NO: 66488 - RNA, 40 nt, Synthetic Construct
  source 1..40: mol_type = other RNA
tgcctttgtgactgcatggctagagtacggtagaggggga

SEQ ID NO: 66489 - RNA, 20 nt, Synthetic Construct
  source 1..20: mol_type = other RNA
acctgggaactgcctttgtg

SEQ ID NO: 66490 - RNA, 42 nt, Synthetic Construct
  source 1..42: mol_type = other RNA
gagagcctggacacaggtgctgcatggccgtcgtcagctcgt

SEQ ID NO: 66491 - RNA, 31 nt, Synthetic Construct
  source 1..31: mol_type = other RNA
gtgggaaggctaaaacagtcaggatgttggc

SEQ ID NO: 66492 - RNA, 28 nt, Synthetic Construct
  source 1..28: mol_type = other RNA
tatatcggaacgtgcccagtcgtggggg

SEQ ID NO: 66493 - RNA, 31 nt, Synthetic Construct
  source 1..31: mol_type = other RNA
tcattgtgaagcagaattcaccaagtgttgg

SEQ ID NO: 66494 - RNA, 42 nt, Synthetic Construct
  source 1..42: mol_type = other RNA
atcccctggacctgtactgacgctcatgcacgaaagcgtggg

SEQ ID NO: 66495 - RNA, 35 nt, Synthetic Construct
  source 1..35: mol_type = other RNA
caactctcaacaacggatatcttggctctcgcaac

SEQ ID NO: 66496 - RNA, 20 nt, Synthetic Construct
  source 1..20: mol_type = other RNA
cactgatcgagtcgtcctgc

SEQ ID NO: 66497 - RNA, 23 nt, Synthetic Construct
  source 1..23: mol_type = other RNA
gcactgtttaggctagggggtca

SEQ ID NO: 66498 - RNA, 20 nt, Synthetic Construct
  source 1..20: mol_type = other RNA
tgtgactgcatggctagagt

SEQ ID NO: 66499 - RNA, 16 nt, Synthetic Construct
  source 1..16: mol_type = other RNA
tgttggttcaagcgtg

SEQ ID NO: 66500 - RNA, 20 nt, Synthetic Construct
  source 1..20: mol_type = other RNA
caggacgttgataggctggg

SEQ ID NO: 66501 - RNA, 30 nt, Synthetic Construct
  source 1..30: mol_type = other RNA
cgggatggggacagtgtatggtgggcagtt

SEQ ID NO: 66502 - RNA, 25 nt, Synthetic Construct
  source 1..25: mol_type = other RNA
gatgcgtggtaggagagcgttctgt

SEQ ID NO: 66503 - RNA, 21 nt, Synthetic Construct
  source 1..21: mol_type = other RNA
ggcagggttcgtgactggggt

SEQ ID NO: 66504 - RNA, 25 nt, Synthetic Construct
  source 1..25: mol_type = other RNA
cccggtcgtagtccggatcgtagtc

SEQ ID NO: 66505 - RNA, 22 nt, Synthetic Construct
  source 1..22: mol_type = other RNA
gtgagctgggtttaaaacgtcg

SEQ ID NO: 66506 - RNA, 38 nt, Synthetic Construct
  source 1..38: mol_type = other RNA
accggagtggacgcacctctggtgtatcggttgtcacg

SEQ ID NO: 66507 - RNA, 22 nt, Synthetic Construct
  source 1..22: mol_type = other RNA
cccctggacctgtactgacgct

SEQ ID NO: 66508 - RNA, 27 nt, Synthetic Construct
  source 1..27: mol_type = other RNA
ggcgcttgagagaactctggagaagga

SEQ ID NO: 66509 - RNA, 23 nt, Synthetic Construct
  source 1..23: mol_type = other RNA
tcccctggacctgtactgacgct

SEQ ID NO: 66510 - RNA, 36 nt, Synthetic Construct
  source 1..36: mol_type = other RNA
ggccaggagatggtgacggatccttgaggttgttcg

SEQ ID NO: 66511 - RNA, 37 nt, Synthetic Construct
  source 1..37: mol_type = other RNA
tccacgccctaaacgatgtcaactggttgttgggagg

SEQ ID NO: 66512 - RNA, 27 nt, Synthetic Construct
  source 1..27: mol_type = other RNA
acaggggttcgaatcccctaggggacg

SEQ ID NO: 66513 - RNA, 23 nt, Synthetic Construct
  source 1..23: mol_type = other RNA
gattgaacgctggcggcatgcct

SEQ ID NO: 66514 - RNA, 20 nt, Synthetic Construct
  source 1..20: mol_type = other RNA
ggcagggttcgtgactgggg

SEQ ID NO: 66515 - RNA, 29 nt, Synthetic Construct
  source 1..29: mol_type = other RNA
gggatggggacagtgtatggtgggcagtt

SEQ ID NO: 66516 - RNA, 23 nt, Synthetic Construct
  source 1..23: mol_type = other RNA
tgttggttcaagcgtgtagtcgt

SEQ ID NO: 66517 - RNA, 22 nt, Synthetic Construct
  source 1..22: mol_type = other RNA
cgatgtgcgctggatgttgggc

SEQ ID NO: 66518 - RNA, 33 nt, Synthetic Construct
  source 1..33: mol_type = other RNA
ctgtagctttacattggactttgaacagatctg

SEQ ID NO: 66519 - RNA, 18 nt, Synthetic Construct
  source 1..18: mol_type = other RNA
cagtagctcgaggaaaag

SEQ ID NO: 66520 - RNA, 22 nt, Synthetic Construct
  source 1..22: mol_type = other RNA
tacttagacagtgaggatgttg

SEQ ID NO: 66521 - RNA, 15 nt, Synthetic Construct
  source 1..15: mol_type = other RNA
tcctgacggccatag

SEQ ID NO: 66522 - RNA, 21 nt, Synthetic Construct
  source 1..21: mol_type = other RNA
aagaaagattgcaagaactgc

SEQ ID NO: 66523 - RNA, 21 nt, Synthetic Construct
  source 1..21: mol_type = other RNA
tgaggtaataggttgtgtggt

SEQ ID NO: 66524 - RNA, 23 nt, Synthetic Construct
  source 1..23: mol_type = other RNA
tggtaaaacgacgtacttagtgt

SEQ ID NO: 66525 - RNA, 25 nt, Synthetic Construct
  source 1..25: mol_type = other RNA
ttgaggaaatgagatcgagacgaca

SEQ ID NO: 66526 - RNA, 25 nt, Synthetic Construct
  source 1..25: mol_type = other RNA
ttgaggatatgagaccgagacgaca

SEQ ID NO: 66527 - RNA, 21 nt, Synthetic Construct
  source 1..21: mol_type = other RNA
tgaggtagtaggttatgtggt

SEQ ID NO: 66528 - RNA, 23 nt, Synthetic Construct
  source 1..23: mol_type = other RNA
tggtaatacgaagtacttagtgt

SEQ ID NO: 66529 - RNA, 23 nt, Synthetic Construct
  source 1..23: mol_type = other RNA
tggtaatacgacgtatttagtgt

SEQ ID NO: 66530 - RNA, 21 nt, Synthetic Construct
  source 1..21: mol_type = other RNA
tgaggtagtagattgtgtggt

SEQ ID NO: 66531 - RNA, 25 nt, Synthetic Construct
  source 1..25: mol_type = other RNA
gtgaggatatgagatcgagacgaca

SEQ ID NO: 66532 - RNA, 23 nt, Synthetic Construct
  source 1..23: mol_type = other RNA
tggaatgtaaagaagtatgtact

SEQ ID NO: 66533 - RNA, 22 nt, Synthetic Construct
  source 1..22: mol_type = other RNA
tgtggtagtaggttgtgtggtt

SEQ ID NO: 66534 - RNA, 22 nt, Synthetic Construct
  source 1..22: mol_type = other RNA
tggaacgtaaagaagtatgtat

SEQ ID NO: 66535 - RNA, 23 nt, Synthetic Construct
  source 1..23: mol_type = other RNA
tggtaatacgacgtacatagtgt

SEQ ID NO: 66536 - RNA, 23 nt, Synthetic Construct
  source 1..23: mol_type = other RNA
tggtaatactacgtacttagtgt

SEQ ID NO: 66537 - RNA, 22 nt, Synthetic Construct
  source 1..22: mol_type = other RNA
tggaatgtagagaagtatgtat

SEQ ID NO: 66538 - RNA, 22 nt, Synthetic Construct
  source 1..22: mol_type = other RNA
tgggatgtaaagaagtatgtat

SEQ ID NO: 66539 - RNA, 23 nt, Synthetic Construct
  source 1..23: mol_type = other RNA
tggtaatacgacgtacttagtga

SEQ ID NO: 66540 - RNA, 22 nt, Synthetic Construct
  source 1..22: mol_type = other RNA
tggaatgtaaaggagtatgtat

SEQ ID NO: 66541 - RNA, 25 nt, Synthetic Construct
  source 1..25: mol_type = other RNA
ttgaggatatgagattgagacgaca

SEQ ID NO: 66542 - RNA, 16 nt, Synthetic Construct
  source 1..16: mol_type = other RNA
atctgcggccatagaa

SEQ ID NO: 66543 - RNA, 32 nt, Synthetic Construct
  source 1..32: mol_type = other RNA
gcattgatagtgtaggggtatcatgagtcgtt

SEQ ID NO: 66544 - RNA, 20 nt, Synthetic Construct
  source 1..20: mol_type = other RNA
tgaggaagtaggttgtgtgg

SEQ ID NO: 66545 - RNA, 21 nt, Synthetic Construct
  source 1..21: mol_type = other RNA
tgagatagtaggttgtgtggt

SEQ ID NO: 66546 - RNA, 21 nt, Synthetic Construct
  source 1..21: mol_type = other RNA
tgaggtagtaggttgtgtgat

SEQ ID NO: 66547 - RNA, 21 nt, Synthetic Construct
  source 1..21: mol_type = other RNA
taaggtagtaggttgtgtggt

SEQ ID NO: 66548 - RNA, 21 nt, Synthetic Construct
  source 1..21: mol_type = other RNA
tgaggtagtagtttgtgtggt

SEQ ID NO: 66549 - RNA, 22 nt, Synthetic Construct
  source 1..22: mol_type = other RNA
tggaatgtaaagaggtatgtac

SEQ ID NO: 66550 - RNA, 22 nt, Synthetic Construct
  source 1..22: mol_type = other RNA
tggtatacgacgtacttagtgt

SEQ ID NO: 66551 - RNA, 22 nt, Synthetic Construct
  source 1..22: mol_type = other RNA
tggaatgtgaagaagtatgtat

SEQ ID NO: 66552 - RNA, 21 nt, Synthetic Construct
  source 1..21: mol_type = other RNA
agaggaagtaggttgtgtggt

SEQ ID NO: 66553 - RNA, 22 nt, Synthetic Construct
  source 1..22: mol_type = other RNA
tggaatgtaaggaagtatgtac

SEQ ID NO: 66554 - RNA, 21 nt, Synthetic Construct
  source 1..21: mol_type = other RNA
tgaagtagtaggttgtgtggt

SEQ ID NO: 66555 - RNA, 21 nt, Synthetic Construct
  source 1..21: mol_type = other RNA
tgaggtagtaggttgagtggt

SEQ ID NO: 66556 - RNA, 23 nt, Synthetic Construct
  source 1..23: mol_type = other RNA
tggtaattcgacgtacttagtgt

SEQ ID NO: 66557 - RNA, 21 nt, Synthetic Construct
  source 1..21: mol_type = other RNA
tgtggtagtaggttgtgtggt

SEQ ID NO: 66558 - RNA, 23 nt, Synthetic Construct
  source 1..23: mol_type = other RNA
tggtaatatgacgtacttagtgt

SEQ ID NO: 66559 - RNA, 23 nt, Synthetic Construct
  source 1..23: mol_type = other RNA
tggtaatacgacgaacttagtgt

SEQ ID NO: 66560 - RNA, 25 nt, Synthetic Construct
  source 1..25: mol_type = other RNA
ttgaggatacgagatcgagacgaca

SEQ ID NO: 66561 - RNA, 25 nt, Synthetic Construct
  source 1..25: mol_type = other RNA
ttgaggatatgagatcgaaacgaca

SEQ ID NO: 66562 - RNA, 22 nt, Synthetic Construct
  source 1..22: mol_type = other RNA
aggaaagtaaagaagtatgtat

SEQ ID NO: 66563 - RNA, 22 nt, Synthetic Construct
  source 1..22: mol_type = other RNA
tggaatgcaaagaagtatgtat

SEQ ID NO: 66564 - RNA, 23 nt, Synthetic Construct
  source 1..23: mol_type = other RNA
tgttaatacgacgtacttagtgt

SEQ ID NO: 66565 - RNA, 22 nt, Synthetic Construct
  source 1..22: mol_type = other RNA
tgaggtagtaggttgtgttgtt

SEQ ID NO: 66566 - RNA, 25 nt, Synthetic Construct
  source 1..25: mol_type = other RNA
tcgaggatatgagatcgagacgaca

SEQ ID NO: 66567 - RNA, 22 nt, Synthetic Construct
  source 1..22: mol_type = other RNA
tggaatgtaaagaagtatgcat

SEQ ID NO: 66568 - RNA, 23 nt, Synthetic Construct
  source 1..23: mol_type = other RNA
tggtaatacgacgtacttagagt

SEQ ID NO: 66569 - RNA, 25 nt, Synthetic Construct
  source 1..25: mol_type = other RNA
ttgaggatatgagatagagacgaca

SEQ ID NO: 66570 - RNA, 21 nt, Synthetic Construct
  source 1..21: mol_type = other RNA
tgaggtagtaggatgtgtggt

SEQ ID NO: 66571 - RNA, 23 nt, Synthetic Construct
  source 1..23: mol_type = other RNA
aggaaatacgacgtacttagtgt

SEQ ID NO: 66572 - RNA, 22 nt, Synthetic Construct
  source 1..22: mol_type = other RNA
tggaatgtaaagaagtacgtat

SEQ ID NO: 66573 - RNA, 22 nt, Synthetic Construct
  source 1..22: mol_type = other RNA
tggaatgtaaagaagtatgtgt

SEQ ID NO: 66574 - RNA, 24 nt, Synthetic Construct
  source 1..24: mol_type = other RNA
tgaggtagtaggttgcgtggttat

SEQ ID NO: 66575 - RNA, 25 nt, Synthetic Construct
  source 1..25: mol_type = other RNA
ttaaggatatgagatcgagacgaca

SEQ ID NO: 66576 - RNA, 20 nt, Synthetic Construct
  source 1..20: mol_type = other RNA
tgaggtagtagattgtgtgg

SEQ ID NO: 66577 - RNA, 21 nt, Synthetic Construct
  source 1..21: mol_type = other RNA
tgaggtagtaggttgtgttgt

SEQ ID NO: 66578 - RNA, 21 nt, Synthetic Construct
  source 1..21: mol_type = other RNA
cgaggggcagagagcgagact

SEQ ID NO: 66579 - RNA, 22 nt, Synthetic Construct
  source 1..22: mol_type = other RNA
tggaatgtaaaggagtatgtac

SEQ ID NO: 66580 - RNA, 23 nt, Synthetic Construct
  source 1..23: mol_type = other RNA
aggaatgtaaagaagtatgtatt

SEQ ID NO: 66581 - RNA, 20 nt, Synthetic Construct
  source 1..20: mol_type = other RNA
tggaaagtaaagaagtatgt

SEQ ID NO: 66582 - RNA, 25 nt, Synthetic Construct
  source 1..25: mol_type = other RNA
ttgaggatatgagatcgagacaaca

SEQ ID NO: 66583 - RNA, 20 nt, Synthetic Construct
  source 1..20: mol_type = other RNA
taaggtagtaggttgtgtgg

SEQ ID NO: 66584 - RNA, 21 nt, Synthetic Construct
  source 1..21: mol_type = other RNA
tgaggtagaaggttgtgtggt

SEQ ID NO: 66585 - RNA, 22 nt, Synthetic Construct
  source 1..22: mol_type = other RNA
tggaatgtaaggaagtatgtat

SEQ ID NO: 66586 - RNA, 22 nt, Synthetic Construct
  source 1..22: mol_type = other RNA
tggagtgtaaagaagtatgtat

SEQ ID NO: 66587 - RNA, 20 nt, Synthetic Construct
  source 1..20: mol_type = other RNA
tgaagtagtaggttgtgtgg

SEQ ID NO: 66588 - RNA, 22 nt, Synthetic Construct
  source 1..22: mol_type = other RNA
tggaatgtaaagaagtatgtgc

SEQ ID NO: 66589 - RNA, 21 nt, Synthetic Construct
  source 1..21: mol_type = other RNA
tggaatgtaaggaagtatgta

SEQ ID NO: 66590 - RNA, 22 nt, Synthetic Construct
  source 1..22: mol_type = other RNA
tggtaatacgacgtactagtgt

SEQ ID NO: 66591 - RNA, 22 nt, Synthetic Construct
  source 1..22: mol_type = other RNA
tggaatgtaaagaagcatgtat

SEQ ID NO: 66592 - RNA, 22 nt, Synthetic Construct
  source 1..22: mol_type = other RNA
tggaatgtaaagaggtatgtat

SEQ ID NO: 66593 - RNA, 16 nt, Synthetic Construct
  source 1..16: mol_type = other RNA
ggctacggccatacca

SEQ ID NO: 66594 - RNA, 20 nt, Synthetic Construct
  source 1..20: mol_type = other RNA
atggttcctttggtcgctcg

SEQ ID NO: 66595 - RNA, 40 nt, Synthetic Construct
  source 1..40: mol_type = other RNA
gtctacggccataccaccctgaacgcgcccgatctcgtct

SEQ ID NO: 66596 - RNA, 22 nt, Synthetic Construct
  source 1..22: mol_type = other RNA
agtaaggtcagctaaataagct

SEQ ID NO: 66597 - RNA, 21 nt, Synthetic Construct
  source 1..21: mol_type = other RNA
gtctacggccataccaccctg

SEQ ID NO: 66598 - RNA, 21 nt, Synthetic Construct
  source 1..21: mol_type = other RNA
taactccttaagcaatctcgc

SEQ ID NO: 66599 - RNA, 22 nt, Synthetic Construct
  source 1..22: mol_type = other RNA
ccccccactgctaaatttgact

SEQ ID NO: 66600 - RNA, 20 nt, Synthetic Construct
  source 1..20: mol_type = other RNA
ggggatgtagctcagtggta

SEQ ID NO: 66601 - RNA, 20 nt, Synthetic Construct
  source 1..20: mol_type = other RNA
ggggatgtagctcagtggta

SEQ ID NO: 66602 - RNA, 15 nt, Synthetic Construct
  source 1..15: mol_type = other RNA
cgactcttagcggtg

SEQ ID NO: 66603 - RNA, 17 nt, Synthetic Construct
  source 1..17: mol_type = other RNA
gactcttagcggtggat

SEQ ID NO: 66604 - RNA, 25 nt, Synthetic Construct
  source 1..25: mol_type = other RNA
agctacatctggctactgggtcttt

SEQ ID NO: 66605 - RNA, 44 nt, Synthetic Construct; identical to SEQ ID NO: 720
  source 1..44: mol_type = other RNA

SEQ ID NO: 66606 - RNA, 32 nt, Synthetic Construct
  source 1..32: mol_type = other RNA
acgcgacctcagatcagacgtggcgacccgct

SEQ ID NO: 66607 - RNA, 42 nt, Synthetic Construct
  source 1..42: mol_type = other RNA
cgcgacctcagatcagacgtggcgacccgctgaatttaagca

SEQ ID NO: 66608 - RNA, 21 nt, Synthetic Construct
  source 1..21: mol_type = other RNA
ggctggtccgaaggtagtgag

SEQ ID NO: 66609 - RNA, 18 nt, Synthetic Construct
  source 1..18: mol_type = other RNA
gagaaagctcacaagaac

SEQ ID NO: 66610 - RNA, 21 nt, Synthetic Construct
  source 1..21: mol_type = other RNA
tacctggttgatcctgccagt

SEQ ID NO: 66611 - RNA, 23 nt, Synthetic Construct
  source 1..23: mol_type = other RNA
ccccccactgctaaatttgactg

SEQ ID NO: 66612 - RNA, 29 nt, Synthetic Construct
  source 1..29: mol_type = other RNA
cgcgacctcagatcagacgtggcgacccg

SEQ ID NO: 66613 - RNA, 21 nt, Synthetic Construct
  source 1..21: mol_type = other RNA
cagcagcaattcatgttttga

SEQ ID NO: 66614 - RNA, 32 nt, Synthetic Construct; identical to SEQ ID NO: 935
  source 1..32: mol_type = other RNA

SEQ ID NO: 66615 - RNA, 24 nt, Synthetic Construct
  source 1..24: mol_type = other RNA
tggctcagttcagcaggaacagta

SEQ ID NO: 66616 - RNA, 31 nt, Synthetic Construct
  source 1..31: mol_type = other RNA
gactcttagcggtggatcactcggctcgtgc

SEQ ID NO: 66617 - RNA, 16 nt, Synthetic Construct
  source 1..16: mol_type = other RNA
ccccccactgctaatt

SEQ ID NO: 66618 - RNA, 23 nt, Synthetic Construct
  source 1..23: mol_type = other RNA
ggctggtccgaaggtagtgagtt

SEQ ID NO: 66619 - RNA, 20 nt, Synthetic Construct
  source 1..20: mol_type = other RNA
cgactcttagcggtggatca

SEQ ID NO: 66620 - RNA, 28 nt, Synthetic Construct
  source 1..28: mol_type = other RNA
cgcgacctcagatcagacgtggcgaccc

SEQ ID NO: 66621 - RNA, 27 nt, Synthetic Construct
  source 1..27: mol_type = other RNA
tccctggtggtctagtggttaggattc

SEQ ID NO: 66622 - RNA, 17 nt, Synthetic Construct
  source 1..17: mol_type = other RNA
gcgccgctggtgtagtg

SEQ ID NO: 66623 - RNA, 21 nt, Synthetic Construct
  source 1..21: mol_type = other RNA
agctccgaggtgattttcata

SEQ ID NO: 66624 - RNA, 18 nt, Synthetic Construct
  source 1..18: mol_type = other RNA
tccctggtggtctagtgg

SEQ ID NO: 66625 - RNA, 26 nt, Synthetic Construct
  source 1..26: mol_type = other RNA
gtttccgtagtgtagtggttatcacg

SEQ ID NO: 66626 - RNA, 21 nt, Synthetic Construct
  source 1..21: mol_type = other RNA
tactccttaagcgaatctcgc

SEQ ID NO: 66627 - RNA, 21 nt, Synthetic Construct
  source 1..21: mol_type = other RNA
taactccttaagcgatctcgc

SEQ ID NO: 66628 - RNA, 35 nt, Synthetic Construct; identical to SEQ ID NO: 1160
  source 1..35: mol_type = other RNA

SEQ ID NO: 66629 - RNA, 18 nt, Synthetic Construct
  source 1..18: mol_type = other RNA
gcgccgctggtgtagtgg

SEQ ID NO: 66630 - RNA, 30 nt, Synthetic Construct
  source 1..30: mol_type = other RNA
gcccggatagctcagtcggtagagcatcag

SEQ ID NO: 66631 - RNA, 34 nt, Synthetic Construct; identical to SEQ ID NO: 13733
  source 1..34: mol_type = other RNA

SEQ ID NO: 66632 - RNA, 21 nt, Synthetic Construct
  source 1..21: mol_type = other RNA
gggaatgtaaagaagtatgta

SEQ ID NO: 66633 - RNA, 21 nt, Synthetic Construct
  source 1..21: mol_type = other RNA
tggaaagtaaagaagtatgta

SEQ ID NO: 66634 - RNA, 22 nt, Synthetic Construct
  source 1..22: mol_type = other RNA
agaggaagtaggttgtgtggtt

SEQ ID NO: 66635 - RNA, 22 nt, Synthetic Construct
  source 1..22: mol_type = other RNA
tgggatgtaaagaagtatgtac

SEQ ID NO: 66636 - RNA, 23 nt, Synthetic Construct
  source 1..23: mol_type = other RNA
tgaggaagtagtttgtgctgtta

SEQ ID NO: 66637 - RNA, 21 nt, Synthetic Construct
  source 1..21: mol_type = other RNA
tggagtgtaaagaagtatgta

SEQ ID NO: 66638 - RNA, 22 nt, Synthetic Construct
  source 1..22: mol_type = other RNA
tggaatgcaaagaagtatgtac

SEQ ID NO: 66639 - RNA, 23 nt, Synthetic Construct
  source 1..23: mol_type = other RNA
tggtaatacgatgtacttagtgt

SEQ ID NO: 66640 - RNA, 23 nt, Synthetic Construct
  source 1..23: mol_type = other RNA
tggtaacacgacgtacttagtgt

SEQ ID NO: 66641 - RNA, 22 nt, Synthetic Construct
  source 1..22: mol_type = other RNA
tggaaagtaaagaagtatgtac

SEQ ID NO: 66642 - RNA, 22 nt, Synthetic Construct
  source 1..22: mol_type = other RNA
aagaaagattgcaagaactgct

SEQ ID NO: 66643 - RNA, 25 nt, Synthetic Construct
  source 1..25: mol_type = other RNA
ctgaggatatgagatcgagacgaca

SEQ ID NO: 66644 - RNA, 23 nt, Synthetic Construct
  source 1..23: mol_type = other RNA
tggcaatacgacgtacttagtgt

SEQ ID NO: 66645 - RNA, 22 nt, Synthetic Construct
  source 1..22: mol_type = other RNA
cggaatgtaaagaagtatgtac

SEQ ID NO: 66646 - RNA, 23 nt, Synthetic Construct
  source 1..23: mol_type = other RNA
tggtaatacgacgcacttagtgt

SEQ ID NO: 66647 - RNA, 22 nt, Synthetic Construct
  source 1..22: mol_type = other RNA
tggagtgtaaagaagtatgtac

SEQ ID NO: 66648 - RNA, 23 nt, Synthetic Construct
  source 1..23: mol_type = other RNA
tggaaagtaaagaagtatgtatt

SEQ ID NO: 66649 - RNA, 28 nt, Synthetic Construct
  source 1..28: mol_type = other RNA
ttacttgatgatagtaaaagatctgatg

SEQ ID NO: 66650 - RNA, 21 nt, Synthetic Construct
  source 1..21: mol_type = other RNA
tggaatgtaaagaggtatgta

SEQ ID NO: 66651 - RNA, 23 nt, Synthetic Construct
  source 1..23: mol_type = other RNA
tggtaatacgacgtacctagtgt

SEQ ID NO: 66652 - RNA, 21 nt, Synthetic Construct
  source 1..21: mol_type = other RNA
tgaggtagtaagttgtgtggt

SEQ ID NO: 66653 - RNA, 22 nt, Synthetic Construct
  source 1..22: mol_type = other RNA
tggaatgtaaataagtatgtat

SEQ ID NO: 66654 - RNA, 25 nt, Synthetic Construct
  source 1..25: mol_type = other RNA
ttgaggataagagatcgagacgaca

SEQ ID NO: 66655 - RNA, 19 nt, Synthetic Construct
  source 1..19: mol_type = other RNA
gaaagattgcaagaactgc

SEQ ID NO: 66656 - RNA, 22 nt, Synthetic Construct
  source 1..22: mol_type = other RNA
tggaatgtaaagaagcatgtac

SEQ ID NO: 66657 - RNA, 22 nt, Synthetic Construct
  source 1..22: mol_type = other RNA
tggtatgtaaagaagtatgtat

SEQ ID NO: 66658 - RNA, 20 nt, Synthetic Construct
  source 1..20: mol_type = other RNA
tgaggtaataggttgtgtgg

SEQ ID NO: 66659 - RNA, 23 nt, Synthetic Construct
  source 1..23: mol_type = other RNA
tggtaatacgacgtactcagtgt

SEQ ID NO: 66660 - RNA, 23 nt, Synthetic Construct
  source 1..23: mol_type = other RNA
tggtaatacgacgtacttagtgc

SEQ ID NO: 66661 - RNA, 23 nt, Synthetic Construct
  source 1..23: mol_type = other RNA
gggaatgtaaagaagtatgtatt

SEQ ID NO: 66662 - RNA, 21 nt, Synthetic Construct
  source 1..21: mol_type = other RNA
tggaatgtagagaagtatgta

SEQ ID NO: 66663 - RNA, 25 nt, Synthetic Construct
  source 1..25: mol_type = other RNA
ttgaggatatgagatcgagacgacg

SEQ ID NO: 66664 - RNA, 23 nt, Synthetic Construct
  source 1..23: mol_type = other RNA
tggaatgtaaagaagtatgtacc

SEQ ID NO: 66665 - RNA, 20 nt, Synthetic Construct
  source 1..20: mol_type = other RNA
agaggaagtaggttgtgtgg

SEQ ID NO: 66666 - RNA, 22 nt, Synthetic Construct
  source 1..22: mol_type = other RNA
tgaggtagtatgttgtgtggtt

SEQ ID NO: 66667 - RNA, 22 nt, Synthetic Construct
  source 1..22: mol_type = other RNA
tggtaatacgacgtacttagtg

SEQ ID NO: 66668 - RNA, 25 nt, Synthetic Construct
  source 1..25: mol_type = other RNA
ttgaggatatgagatcaagacgaca

SEQ ID NO: 66669 - RNA, 21 nt, Synthetic Construct
  source 1..21: mol_type = other RNA
tggaatgtaaaggagtatgta

SEQ ID NO: 66670 - RNA, 16 nt, Synthetic Construct
  source 1..16: mol_type = other RNA
gaagctgtgggattga

SEQ ID NO: 66671 - RNA, 23 nt, Synthetic Construct
  source 1..23: mol_type = other RNA
tccagaactgagctgccccgaga

SEQ ID NO: 66672 - RNA, 21 nt, Synthetic Construct
  source 1..21: mol_type = other RNA
tgggatgtaaagaagtatgta

SEQ ID NO: 66673 - RNA, 23 nt, Synthetic Construct
  source 1..23: mol_type = other RNA
tggtaatacgacgtacttagtat

SEQ ID NO: 66674 - RNA, 22 nt, Synthetic Construct
  source 1..22: mol_type = other RNA
tggaacgtaaagaagtatgtac

SEQ ID NO: 66675 - RNA, 44 nt, Synthetic Construct
  source 1..44: mol_type = other RNA
gactcttagcggtggatcactcggctcgtgcgtcgatgaagaac

SEQ ID NO: 66676 - RNA, 23 nt, Synthetic Construct
  source 1..23: mol_type = other RNA
ttcaccaccttctccacccagct

SEQ ID NO: 66677 - RNA, 18 nt, Synthetic Construct
  source 1..18: mol_type = other RNA
agtaaggtcagctaaata

SEQ ID NO: 66678 - RNA, 44 nt, Synthetic Construct
  source 1..44: mol_type = other RNA
cgactcttagcggtggatcactcggctcgtgcgtcgatgaagaa

SEQ ID NO: 66679 - RNA, 38 nt, Synthetic Construct
  source 1..38: mol_type = other RNA
agcaggacggtggccatggaagtcggaatccgctaagg

SEQ ID NO: 66680 - RNA, 18 nt, Synthetic Construct
  source 1..18: mol_type = other RNA
cacggaccaaggagtcta

SEQ ID NO: 66681 - RNA, 28 nt, Synthetic Construct
  source 1..28: mol_type = other RNA
cggtgcgccgcgaccggctccgggacgg

SEQ ID NO: 66682 - RNA, 33 nt, Synthetic Construct
  source 1..33: mol_type = other RNA
aaccattcgtagacgacctgcttctgggtcggg

SEQ ID NO: 66683 - RNA, 34 nt, Synthetic Construct
  source 1..34: mol_type = other RNA
gactcttagcggtggatcactcggctcgtgcgtc

SEQ ID NO: 66684 - RNA, 42 nt, Synthetic Construct
  source 1..42: mol_type = other RNA
agcaggacggtggccatggaagtcggaatccgctaaggagtg

SEQ ID NO: 66685 - RNA, 16 nt, Synthetic Construct
  source 1..16: mol_type = other RNA
tgtacacaccgcccgt

SEQ ID NO: 66686 - RNA, 44 nt, Synthetic Construct
  source 1..44: mol_type = other RNA
tacctggttgatcctgccagtagcatatgcttgtctcaaagatt

SEQ ID NO: 66687 - RNA, 40 nt, Synthetic Construct
  source 1..40: mol_type = other RNA
cgactcttagcggtggatcactcggctcgtgcgtcgatga

SEQ ID NO: 66688 - RNA, 17 nt, Synthetic Construct
  source 1..17: mol_type = other RNA
tgccagcagccgcggta

SEQ ID NO: 66689 - RNA, 22 nt, Synthetic Construct
  source 1..22: mol_type = other RNA
tgctctgaatgtcaaagtgaag

SEQ ID NO: 66690 - RNA, 19 nt, Synthetic Construct
  source 1..19: mol_type = other RNA
cgtacgactcttagcggtg

SEQ ID NO: 66691 - RNA, 30 nt, Synthetic Construct
  source 1..30: mol_type = other RNA
gcagccgacttagaactggtgcggaccagg

SEQ ID NO: 66692 - RNA, 27 nt, Synthetic Construct
  source 1..27: mol_type = other RNA
ggccgtgatcgtatagtggttagtact

SEQ ID NO: 66693 - RNA, 23 nt, Synthetic Construct
  source 1..23: mol_type = other RNA
ggggatgtagctcagtggtagag

SEQ ID NO: 66694 - RNA, 22 nt, Synthetic Construct
  source 1..22: mol_type = other RNA
tacctggttgatcctgccagta

SEQ ID NO: 66695 - RNA, 21 nt, Synthetic Construct
  source 1..21: mol_type = other RNA
ggggatgtagctcagtggtag

SEQ ID NO: 66696 - RNA, 18 nt, Synthetic Construct
  source 1..18: mol_type = other RNA
cagagaatagtttaaatt

SEQ ID NO: 66697 - RNA, 20 nt, Synthetic Construct
  source 1..20: mol_type = other RNA
gtgctctgaatgtcaaagtg

SEQ ID NO: 66698 - RNA, 21 nt, Synthetic Construct
  source 1..21: mol_type = other RNA
ctcgtacgactcttagcggtg

SEQ ID NO: 66699 - RNA, 33 nt, Synthetic Construct
  source 1..33: mol_type = other RNA
tggtagaattctcgcctgccacgcgggaggccc

SEQ ID NO: 66700 - RNA, 16 nt, Synthetic Construct
  source 1..16: mol_type = other RNA
gcgagaggtcccgggt

SEQ ID NO: 66701 - RNA, 19 nt, Synthetic Construct
  source 1..19: mol_type = other RNA
acacggaccaaggagtcta

SEQ ID NO: 66702 - RNA, 23 nt, Synthetic Construct
  source 1..23: mol_type = other RNA
tgactgaacgcctctaagtcaga

SEQ ID NO: 66703 - RNA, 16 nt, Synthetic Construct
  source 1..16: mol_type = other RNA
acgaggatccattgga

SEQ ID NO: 66704 - RNA, 21 nt, Synthetic Construct
  source 1..21: mol_type = other RNA
ggggatgtagctcagtggtag

SEQ ID NO: 66705 - RNA, 21 nt, Synthetic Construct
  source 1..21: mol_type = other RNA
atgccttgagtgtaggaccgt

SEQ ID NO: 66706 - RNA, 23 nt, Synthetic Construct
  source 1..23: mol_type = other RNA
ggggatgtagctcagtggtagag

SEQ ID NO: 66707 - RNA, 26 nt, Synthetic Construct
  source 1..26: mol_type = other RNA
tgtaaacatcctacactctcagcttt

SEQ ID NO: 66708 - RNA, 18 nt, Synthetic Construct
  source 1..18: mol_type = other RNA
gcacttgtcccggcctgt

SEQ ID NO: 66709 - RNA, 21 nt, Synthetic Construct
  source 1..21: mol_type = other RNA
aaaagctgggttgagagggaa

SEQ ID NO: 66710 - RNA, 25 nt, Synthetic Construct
  source 1..25: mol_type = other RNA
agtaaggtcagctaaataagctatc

SEQ ID NO: 66711 - RNA, 16 nt, Synthetic Construct
  source 1..16: mol_type = other RNA
gtaagggaagtcggca

SEQ ID NO: 66712 - RNA, 26 nt, Synthetic Construct
  source 1..26: mol_type = other RNA
gtctacggccataccaccctgaacgc

SEQ ID NO: 66713 - RNA, 16 nt, Synthetic Construct
  source 1..16: mol_type = other RNA
ttggagggcaagtctg

SEQ ID NO: 66714 - RNA, 16 nt, Synthetic Construct
  source 1..16: mol_type = other RNA
gggataactggcttgt

SEQ ID NO: 66715 - RNA, 24 nt, Synthetic Construct
  source 1..24: mol_type = other RNA
cccagtgttcagactacctgttca

SEQ ID NO: 66716 - RNA, 21 nt, Synthetic Construct
  source 1..21: mol_type = other RNA
taactccttagcgaatctcgc

SEQ ID NO: 66717 - RNA, 19 nt, Synthetic Construct
  source 1..19: mol_type = other RNA
gcctgtctgagcgtcgctt

SEQ ID NO: 66718 - RNA, 24 nt, Synthetic Construct
  source 1..24: mol_type = other RNA
acggcgggagtaactatgactctc

SEQ ID NO: 66719 - RNA, 22 nt, Synthetic Construct
  source 1..22: mol_type = other RNA
tctacagtgcacgtgtctccag

SEQ ID NO: 66720 - RNA, 39 nt, Synthetic Construct
  source 1..39: mol_type = other RNA
gctgcgatctattgaaagtcagccctcgacacaagggtt

SEQ ID NO: 66721 - RNA, 22 nt, Synthetic Construct
  source 1..22: mol_type = other RNA
tcccacatggtctagcggttag

SEQ ID NO: 66722 - RNA, 33 nt, Synthetic Construct
  source 1..33: mol_type = other RNA
ggagatttcaacttaacttgaccgctctgacca

SEQ ID NO: 66723 - RNA, 42 nt, Synthetic Construct
  source 1..42: mol_type = other RNA
cagagtgtagcttaacacaaagcacccaacttacacttagga

SEQ ID NO: 66724 - RNA, 21 nt, Synthetic Construct
  source 1..21: mol_type = other RNA
taactccttaagcgaatctcg

SEQ ID NO: 66725 - RNA, 19 nt, Synthetic Construct
  source 1..19: mol_type = other RNA
cagtgcaatgatgaaaggg

SEQ ID NO: 66726 - RNA, 25 nt, Synthetic Construct
  source 1..25: mol_type = other RNA
aaccattcgtagacgacctgcttct

SEQ ID NO: 66727 - RNA, 44 nt, Synthetic Construct
  source 1..44: mol_type = other RNA
cgcgacctcagatcagacgtggcgacccgctgaatttaagcata

SEQ ID NO: 66728 - RNA, 17 nt, Synthetic Construct
  source 1..17: mol_type = other RNA
aggaaactctggtggag

SEQ ID NO: 66729 - RNA, 18 nt, Synthetic Construct
  source 1..18: mol_type = other RNA
tacctggttgatcctgcc

SEQ ID NO: 66730 - RNA, 18 nt, Synthetic Construct
  source 1..18: mol_type = other RNA
tcttcggtagtatagtgg

SEQ ID NO: 66731 - RNA, 27 nt, Synthetic Construct
  source 1..27: mol_type = other RNA
catctaattagtgacgcgcatgaatgg

SEQ ID NO: 66732 - RNA, 15 nt, Synthetic Construct
  source 1..15: mol_type = other RNA
cgagtgacgtagtgt

SEQ ID NO: 66733 - RNA, 17 nt, Synthetic Construct
  source 1..17: mol_type = other RNA
ggaaactctggtggagg

SEQ ID NO: 66734 - RNA, 23 nt, Synthetic Construct
  source 1..23: mol_type = other RNA
cggcgggagtaactatgactctc

SEQ ID NO: 66735 - RNA, 21 nt, Synthetic Construct
  source 1..21: mol_type = other RNA
tgttgtacttttttttttgtt

SEQ ID NO: 66736 - RNA, 23 nt, Synthetic Construct
  source 1..23: mol_type = other RNA
ttttgtgtctcccattccccagt

SEQ ID NO: 66737 - RNA, 22 nt, Synthetic Construct
  source 1..22: mol_type = other RNA
agtgtttcctactttatggatg

SEQ ID NO: 66738 - RNA, 19 nt, Synthetic Construct
  source 1..19: mol_type = other RNA
gcctgtctgagcgtcgctt

SEQ ID NO: 66739 - RNA, 16 nt, Synthetic Construct
  source 1..16: mol_type = other RNA
cgcgacctcagatcag

SEQ ID NO: 66740 - RNA, 40 nt, Synthetic Construct
  source 1..40: mol_type = other RNA
gcttctgtagtgtagtggttatcacgttcgcctcacacgc

SEQ ID NO: 66741 - RNA, 22 nt, Synthetic Construct
  source 1..22: mol_type = other RNA
ttctcgctttgggtgcgagagg

SEQ ID NO: 66742 - RNA, 18 nt, Synthetic Construct
  source 1..18: mol_type = other RNA
tcctcgttagtatagtgg

SEQ ID NO: 66743 - RNA, 33 nt, Synthetic Construct
  source 1..33: mol_type = other RNA
ataggtttggtcctagcctttctattagctctt

SEQ ID NO: 66744 - RNA, 21 nt, Synthetic Construct
  source 1..21: mol_type = other RNA
cggcgggagccccggggagag

SEQ ID NO: 66745 - RNA, 17 nt, Synthetic Construct
  source 1..17: mol_type = other RNA
tccccggcacctccacc

SEQ ID NO: 66746 - RNA, 18 nt, Synthetic Construct
  source 1..18: mol_type = other RNA
acgaggatccattggagg

SEQ ID NO: 66747 - RNA, 24 nt, Synthetic Construct
  source 1..24: mol_type = other RNA
gtctacggccataccaccctgaac

SEQ ID NO: 66748 - RNA, 23 nt, Synthetic Construct
  source 1..23: mol_type = other RNA
cgactcttagcggtggatcactc

SEQ ID NO: 66749 - RNA, 36 nt, Synthetic Construct
  source 1..36: mol_type = other RNA
gcgggagaccggggttcgattccccgacggggagcc

SEQ ID NO: 66750 - RNA, 19 nt, Synthetic Construct
  source 1..19: mol_type = other RNA
ggccggttagctcagttgg

SEQ ID NO: 66751 - RNA, 30 nt, Synthetic Construct
  source 1..30: mol_type = other RNA
gctcgttggtctaggggtatgattctcgct

SEQ ID NO: 66752 - RNA, 24 nt, Synthetic Construct
  source 1..24: mol_type = other RNA
aacggaatcccaaaagcagctgtt

SEQ ID NO: 66753 - RNA, 20 nt, Synthetic Construct
  source 1..20: mol_type = other RNA
actgccccaggtgctgctgg

SEQ ID NO: 66754 - RNA, 31 nt, Synthetic Construct
  source 1..31: mol_type = other RNA
ggctcgttggtctaggggtatgattctcggt

SEQ ID NO: 66755 - RNA, 20 nt, Synthetic Construct
  source 1..20: mol_type = other RNA
gtagtgtttcctactttatg

SEQ ID NO: 66756 - RNA, 24 nt, Synthetic Construct
  source 1..24: mol_type = other RNA
agcagcattgtacagggctatcat

SEQ ID NO: 66757 - RNA, 23 nt, Synthetic Construct
  source 1..23: mol_type = other RNA
aatccttggaacctaggtgtgag

SEQ ID NO: 66758 - RNA, 24 nt, Synthetic Construct
  source 1..24: mol_type = other RNA
agaactgaattccatgggttgtgt

SEQ ID NO: 66759 - RNA, 27 nt, Synthetic Construct
  source 1..27: mol_type = other RNA
cggctagctcagtcggtagagcatggg

SEQ ID NO: 66760 - RNA, 24 nt, Synthetic Construct
  source 1..24: mol_type = other RNA
tgtcagtttgtcaaataccccaga

SEQ ID NO: 66761 - RNA, 21 nt, Synthetic Construct
  source 1..21: mol_type = other RNA
gagaaagctcacaagaactgc

SEQ ID NO: 66762 - RNA, 22 nt, Synthetic Construct
  source 1..22: mol_type = other RNA
gtaaacatccttgactggaagc

SEQ ID NO: 66763 - RNA, 18 nt, Synthetic Construct
  source 1..18: mol_type = other RNA
cacagccaagggaacggg

SEQ ID NO: 66764 - RNA, 20 nt, Synthetic Construct
  source 1..20: mol_type = other RNA
tcgtacgactcttagcggtg

SEQ ID NO: 66765 - RNA, 40 nt, Synthetic Construct
  source 1..40: mol_type = other RNA
tcgtacgactcttagcggtggatcactcggctcgtgcgtc

SEQ ID NO: 66766 - RNA, 34 nt, Synthetic Construct
  source 1..34: mol_type = other RNA
ataggtttggtcctagcctttctattagctctta

SEQ ID NO: 66767 - RNA, 21 nt, Synthetic Construct
  source 1..21: mol_type = other RNA
aaagtcggaggttcgaagacg

SEQ ID NO: 66768 - RNA, 16 nt, Synthetic Construct
  source 1..16: mol_type = other RNA
ttatgactgaacgcct

SEQ ID NO: 66769 - RNA, 42 nt, Synthetic Construct
  source 1..42: mol_type = other RNA
gactcttagcggtggatcactcggctcgtgcgtcgatgaaga

SEQ ID NO: 66770 - RNA, 17 nt, Synthetic Construct
  source 1..17: mol_type = other RNA
tccctggtggtctagtg

SEQ ID NO: 66771 - RNA, 23 nt, Synthetic Construct
  source 1..23: mol_type = other RNA
attattacttttggtacgcgctt

SEQ ID NO: 66772 - RNA, 42 nt, Synthetic Construct
  source 1..42: mol_type = other RNA
ataggtttggtcctagcctttctattagctcttagtaagatt

SEQ ID NO: 66773 - RNA, 22 nt, Synthetic Construct
  source 1..22: mol_type = other RNA
tccccttggggttgtaggacca

SEQ ID NO: 66774 - RNA, 18 nt, Synthetic Construct
  source 1..18: mol_type = other RNA
atctcggtggaacctcca

SEQ ID NO: 66775 - RNA, 24 nt, Synthetic Construct
  source 1..24: mol_type = other RNA
gcgagagtaggacgttgccaggtt

SEQ ID NO: 66776 - RNA, 23 nt, Synthetic Construct
  source 1..23: mol_type = other RNA
tagtgcaatattgcttataggga

SEQ ID NO: 66777 - RNA, 23 nt, Synthetic Construct
  source 1..23: mol_type = other RNA
agtgcaatattgcttatagggtt

SEQ ID NO: 66778 - RNA, 24 nt, Synthetic Construct
  source 1..24: mol_type = other RNA
gtaaacatccttgactggaagctt

SEQ ID NO: 66779 - RNA, 23 nt, Synthetic Construct
  source 1..23: mol_type = other RNA
catcgggaatgtcgtgtccgccc

SEQ ID NO: 66780 - RNA, 41 nt, Synthetic Construct; identical to SEQ ID NO: 805
  source 1..41: mol_type = other RNA

SEQ ID NO: 66781 - RNA, 25 nt, Synthetic Construct
  source 1..25: mol_type = other RNA
tgtcagtttgtcaaatacccctttt

SEQ ID NO: 66782 - RNA, 18 nt, Synthetic Construct
  source 1..18: mol_type = other RNA
atccgggtgccccctcca

SEQ ID NO: 66783 - RNA, 18 nt, Synthetic Construct
  source 1..18: mol_type = other RNA
tcggggcggcggcggcgg

SEQ ID NO: 66784 - RNA, 30 nt, Synthetic Construct; identical to SEQ ID NO: 934
  source 1..30: mol_type = other RNA

SEQ ID NO: 66785 - RNA, 21 nt, Synthetic Construct
  source 1..21: mol_type = other RNA
cgaatcattatttgctgctct

SEQ ID NO: 66786 - RNA, 16 nt, Synthetic Construct
  source 1..16: mol_type = other RNA
cgctaaaccattcgta

SEQ ID NO: 66787 - RNA, 26 nt, Synthetic Construct
  source 1..26: mol_type = other RNA
atgcgagagtaggacgttgccaggtt

SEQ ID NO: 66788 - RNA, 22 nt, Synthetic Construct
  source 1..22: mol_type = other RNA
gactcttagcggtggatcactc

SEQ ID NO: 66789 - RNA, 36 nt, Synthetic Construct
  source 1..36: mol_type = other RNA
ataggtttggtcctagcctttctattagctcttagt

SEQ ID NO: 66790 - RNA, 19 nt, Synthetic Construct
  source 1..19: mol_type = other RNA
cgactcttagcggtggatc

SEQ ID NO: 66791 - RNA, 23 nt, Synthetic Construct
  source 1..23: mol_type = other RNA
gtttttcattattgctcctgacc

SEQ ID NO: 66792 - RNA, 18 nt, Synthetic Construct
  source 1..18: mol_type = other RNA
atcccaccagagtcgcca

SEQ ID NO: 66793 - RNA, 24 nt, Synthetic Construct
  source 1..24: mol_type = other RNA
tccctggtggtctagtggttagga

SEQ ID NO: 66794 - RNA, 28 nt, Synthetic Construct
  source 1..28: mol_type = other RNA
cggctagctcagtcggtagagcatggga

SEQ ID NO: 66795 - RNA, 27 nt, Synthetic Construct
  source 1..27: mol_type = other RNA
tgtaaacatcctacactctcagctttt

SEQ ID NO: 66796 - RNA, 21 nt, Synthetic Construct
  source 1..21: mol_type = other RNA
tgtgcaaatccatgcaaaact

SEQ ID NO: 66797 - RNA, 28 nt, Synthetic Construct
  source 1..28: mol_type = other RNA
aaaagctgggttgagagggcgaattttt

SEQ ID NO: 66798 - RNA, 26 nt, Synthetic Construct
  source 1..26: mol_type = other RNA
catcgggaatgtcgtgtccgcccttt

SEQ ID NO: 66799 - RNA, 26 nt, Synthetic Construct
  source 1..26: mol_type = other RNA
tccctgtcctccaggagctcacgttt

SEQ ID NO: 66800 - RNA, 18 nt, Synthetic Construct
  source 1..18: mol_type = other RNA
agctacattgtctgctgg

SEQ ID NO: 66801 - RNA, 21 nt, Synthetic Construct
  source 1..21: mol_type = other RNA
attctaatttctccacgtctt

SEQ ID NO: 66802 - RNA, 15 nt, Synthetic Construct
  source 1..15: mol_type = other RNA
cgatatggcatgaga

SEQ ID NO: 66803 - RNA, 28 nt, Synthetic Construct
  source 1..28: mol_type = other RNA
actcccactgcttcacttgactagccta

SEQ ID NO: 66804 - RNA, 16 nt, Synthetic Construct
  source 1..16: mol_type = other RNA
agaccctgttgagctt

SEQ ID NO: 66805 - RNA, 18 nt, Synthetic Construct
  source 1..18: mol_type = other RNA
gtgacgcgcatgaatgga

SEQ ID NO: 66806 - RNA, 42 nt, Synthetic Construct
  source 1..42: mol_type = other RNA
gggcggggcggactgtccccagtgcgccccgggcgggtcgcg

SEQ ID NO: 66807 - RNA, 22 nt, Synthetic Construct
  source 1..22: mol_type = other RNA
gtttccgtagtgtagtggttat

SEQ ID NO: 66808 - RNA, 29 nt, Synthetic Construct
  source 1..29: mol_type = other RNA
tgtgatttctgcccagtgctctgaatgtc

SEQ ID NO: 66809 - RNA, 22 nt, Synthetic Construct
  source 1..22: mol_type = other RNA
gagagtaggacgttgccaggtt

SEQ ID NO: 66810 - RNA, 24 nt, Synthetic Construct
  source 1..24: mol_type = other RNA
tgccgtgatcgtatagtggttagt

SEQ ID NO: 66811 - RNA, 20 nt, Synthetic Construct
  source 1..20: mol_type = other RNA
tgaccgatttctcctggtgt

SEQ ID NO: 66812 - RNA, 30 nt, Synthetic Construct; identical to SEQ ID NO: 1641
  source 1..30: mol_type = other RNA

SEQ ID NO: 66813 - RNA, 16 nt, Synthetic Construct
  source 1..16: mol_type = other RNA
tcccacatggtctagc

SEQ ID NO: 66814 - RNA, 36 nt, Synthetic Construct
  source 1..36: mol_type = other RNA
gcttctgtagtgtagtggttatcacgttcgcctcac

SEQ ID NO: 66815 - RNA, 22 nt, Synthetic Construct
  source 1..22: mol_type = other RNA
gcccggatagctcagtcggtag

SEQ ID NO: 66816 - RNA, 25 nt, Synthetic Construct
  source 1..25: mol_type = other RNA
tccctggtggtctagtggttaggat

SEQ ID NO: 66817 - RNA, 23 nt, Synthetic Construct
  source 1..23: mol_type = other RNA
gcccggatagctcagtcggtaga

SEQ ID NO: 66818 - RNA, 31 nt, Synthetic Construct; identical to SEQ ID NO: 18991
  source 1..31: mol_type = other RNA

SEQ ID NO: 66819 - RNA, 31 nt, Synthetic Construct
  source 1..31: mol_type = other RNA
tacctggttgatcctgccagtagcatatgct

SEQ ID NO: 66820 - RNA, 25 nt, Synthetic Construct
  source 1..25: mol_type = other RNA
gcattggtggttcagtggtagaatt

SEQ ID NO: 66821 - RNA, 44 nt, Synthetic Construct
  source 1..44: mol_type = other RNA
tttgtcaaagttaaattataggctaaatcctatatatcttacca

SEQ ID NO: 66822 - RNA, 25 nt, Synthetic Construct
  source 1..25: mol_type = other RNA
tgcgagagtaggacgttgccaggtt

SEQ ID NO: 66823 - RNA, 22 nt, Synthetic Construct
  source 1..22: mol_type = other RNA
tcgtttcccgggcggcgcacca

SEQ ID NO: 66824 - RNA, 33 nt, Synthetic Construct
  source 1..33: mol_type = other RNA
tacctggttgatcctgccagtagcatatgcttg

SEQ ID NO: 66825 - RNA, 27 nt, Synthetic Construct
  source 1..27: mol_type = other RNA
tcctgagtagctcagcggcagagcggg

SEQ ID NO: 66826 - RNA, 22 nt, Synthetic Construct
  source 1..22: mol_type = other RNA
gaagcacattcgcacatcatat

SEQ ID NO: 66827 - RNA, 43 nt, Synthetic Construct
  source 1..43: mol_type = other RNA
cgcgacctcagatcagacgtggcgacccgctgaatttaagcat

SEQ ID NO: 66828 - RNA, 40 nt, Synthetic Construct
  source 1..40: mol_type = other RNA
tacctggttgatcctgccagtagcatatgcttgtctcaaa

SEQ ID NO: 66829 - RNA, 22 nt, Synthetic Construct
  source 1..22: mol_type = other RNA
gtgccgaagctgtgggattgat

SEQ ID NO: 66830 - RNA, 21 nt, Synthetic Construct
  source 1..21: mol_type = other RNA
tgtcagtttgtcaaatacccg

SEQ ID NO: 66831 - RNA, 25 nt, Synthetic Construct
  source 1..25: mol_type = other RNA
tggagagaaaggcagttcctgattt

SEQ ID NO: 66832 - RNA, 24 nt, Synthetic Construct
  source 1..24: mol_type = other RNA
tcaacaaaatcactgatgctggag

SEQ ID NO: 66833 - RNA, 24 nt, Synthetic Construct
  source 1..24: mol_type = other RNA
agtgcaatattgcttatagggttt

SEQ ID NO: 66834 - RNA, 26 nt, Synthetic Construct
  source 1..26: mol_type = other RNA
caacggaatcccaaaagcagctgtaa

SEQ ID NO: 66835 - RNA, 18 nt, Synthetic Construct
  source 1..18: mol_type = other RNA
agcacgtaaatattggcg

SEQ ID NO: 66836 - RNA, 23 nt, Synthetic Construct
  source 1..23: mol_type = other RNA
actccagccccacagcctcagct

SEQ ID NO: 66837 - RNA, 20 nt, Synthetic Construct
  source 1..20: mol_type = other RNA
agctacattgtctgctggga

SEQ ID NO: 66838 - RNA, 20 nt, Synthetic Construct
  source 1..20: mol_type = other RNA
cagtgcaatgttaaaagggc

SEQ ID NO: 66839 - RNA, 21 nt, Synthetic Construct
  source 1..21: mol_type = other RNA
tatggttcctttggtcgctcg

SEQ ID NO: 66840 - RNA, 20 nt, Synthetic Construct
  source 1..20: mol_type = other RNA
taccgggtgctgtaggcttt

SEQ ID NO: 66841 - RNA, 17 nt, Synthetic Construct
  source 1..17: mol_type = other RNA
ggggtatgattctcggt

SEQ ID NO: 66842 - RNA, 24 nt, Synthetic Construct
  source 1..24: mol_type = other RNA
tagtgcaatattgcttatagggta

SEQ ID NO: 66843 - RNA, 35 nt, Synthetic Construct; identical to SEQ ID NO: 737
  source 1..35: mol_type = other RNA

SEQ ID NO: 66844 - RNA, 27 nt, Synthetic Construct
  source 1..27: mol_type = other RNA
tgaaagtcagccctcgacacaagggtt

SEQ ID NO: 66845 - RNA, 20 nt, Synthetic Construct
  source 1..20: mol_type = other RNA
attctaatttctccacgtct

SEQ ID NO: 66846 - RNA, 25 nt, Synthetic Construct
  source 1..25: mol_type = other RNA
ctgggaaccccgagtgacgtagtgt

SEQ ID NO: 66847 - RNA, 16 nt, Synthetic Construct
  source 1..16: mol_type = other RNA
ttggattgttcaccca

SEQ ID NO: 66848 - RNA, 23 nt, Synthetic Construct
  source 1..23: mol_type = other RNA
cgagagtaggacgttgccaggtt

SEQ ID NO: 66849 - RNA, 24 nt, Synthetic Construct
  source 1..24: mol_type = other RNA
tataccgaagctctaggtgcggca

SEQ ID NO: 66850 - RNA, 23 nt, Synthetic Construct
  source 1..23: mol_type = other RNA
gatatcatcatatactgtaagtt

SEQ ID NO: 66851 - RNA, 31 nt, Synthetic Construct; identical to SEQ ID NO: 971
  source 1..31: mol_type = other RNA

SEQ ID NO: 66852 - RNA, 27 nt, Synthetic Construct
  source 1..27: mol_type = other RNA
ggctcgttggtctaggggtatgattct

SEQ ID NO: 66853 - RNA, 25 nt, Synthetic Construct
  source 1..25: mol_type = other RNA
gtctacggccataccaccctgaacg

SEQ ID NO: 66854 - RNA, 23 nt, Synthetic Construct
  source 1..23: mol_type = other RNA
ctgacctatgaattgacagccat

SEQ ID NO: 66855 - RNA, 21 nt, Synthetic Construct
  source 1..21: mol_type = other RNA
tgatttctgcccagtgctctg

SEQ ID NO: 66856 - RNA, 23 nt, Synthetic Construct
  source 1..23: mol_type = other RNA
gtgctctgaatgtcaaagtgaag

SEQ ID NO: 66857 - RNA, 37 nt, Synthetic Construct
  source 1..37: mol_type = other RNA
gtatgattctcgctttgggtgcgagaggtcccgggtt

SEQ ID NO: 66858 - RNA, 27 nt, Synthetic Construct
  source 1..27: mol_type = other RNA
tcccactgcttcacttgactagccttt

SEQ ID NO: 66859 - RNA, 29 nt, Synthetic Construct
  source 1..29: mol_type = other RNA
ccccccactgctaaaatttgactggcttt

SEQ ID NO: 66860 - RNA, 22 nt, Synthetic Construct
  source 1..22: mol_type = other RNA
cgtgtatttgacaagctgagtt

SEQ ID NO: 66861 - RNA, 18 nt, Synthetic Construct
  source 1..18: mol_type = other RNA
gtcccggcggagtcgcca

SEQ ID NO: 66862 - RNA, 18 nt, Synthetic Construct
  source 1..18: mol_type = other RNA
ggggatgtagctcagtgg

SEQ ID NO: 66863 - RNA, 19 nt, Synthetic Construct
  source 1..19: mol_type = other RNA
cagcaggacggtggccatg

SEQ ID NO: 66864 - RNA, 34 nt, Synthetic Construct
  source 1..34: mol_type = other RNA
tggttaggattcggcgctctcaccgccgcggccc

SEQ ID NO: 66865 - RNA, 25 nt, Synthetic Construct
  source 1..25: mol_type = other RNA
actggtgcggaccaggggaatccga

SEQ ID NO: 66866 - RNA, 19 nt, Synthetic Construct
  source 1..19: mol_type = other RNA
aaaccgttaccattactga

SEQ ID NO: 66867 - RNA, 24 nt, Synthetic Construct
  source 1..24: mol_type = other RNA
ctcgtaccgtgagtaataatgcgt

SEQ ID NO: 66868 - RNA, 27 nt, Synthetic Construct
  source 1..27: mol_type = other RNA
gcgggcgtagctcaggggtagagcgca

SEQ ID NO: 66869 - RNA, 38 nt, Synthetic Construct
  source 1..38: mol_type = other RNA
tggtagaattctcgcctgccacgcgggaggcccgggtt

SEQ ID NO: 66870 - RNA, 23 nt, Synthetic Construct
  source 1..23: mol_type = other RNA
ttgggtgcgagaggtcccgggtt

SEQ ID NO: 66871 - RNA, 24 nt, Synthetic Construct
  source 1..24: mol_type = other RNA
gtgctctgaatgtcaaagtgaaga

SEQ ID NO: 66872 - RNA, 30 nt, Synthetic Construct; identical to SEQ ID NO: 768
  source 1..30: mol_type = other RNA

SEQ ID NO: 66873 - RNA, 19 nt, Synthetic Construct
  source 1..19: mol_type = other RNA
tccttcattccaccggagt

SEQ ID NO: 66874 - RNA, 23 nt, Synthetic Construct
  source 1..23: mol_type = other RNA
gaaaaagtcatggaggccatggg

SEQ ID NO: 66875 - RNA, 23 nt, Synthetic Construct
  source 1..23: mol_type = other RNA
gactcttagcggtggatcactcg

SEQ ID NO: 66876 - RNA, 30 nt, Synthetic Construct; identical to SEQ ID NO: 6467
  source 1..30: mol_type = other RNA

SEQ ID NO: 66877 - RNA, 16 nt, Synthetic Construct
  source 1..16: mol_type = other RNA
gggggtatagctcagc

SEQ ID NO: 66878 - RNA, 28 nt, Synthetic Construct
  source 1..28: mol_type = other RNA
ggctcgttggtctaggggtatgattctc

SEQ ID NO: 66879 - RNA, 16 nt, Synthetic Construct
  source 1..16: mol_type = other RNA
cccacgttgggcgcca

SEQ ID NO: 66880 - RNA, 20 nt, Synthetic Construct
  source 1..20: mol_type = other RNA
ttcagtggtagaattctcgc

SEQ ID NO: 66881 - RNA, 18 nt, Synthetic Construct
  source 1..18: mol_type = other RNA
gcattggtggttcagtgg

SEQ ID NO: 66882 - RNA, 16 nt, Synthetic Construct
  source 1..16: mol_type = other RNA
gtcaggatggccgagc

SEQ ID NO: 66883 - RNA, 16 nt, Synthetic Construct
  source 1..16: mol_type = other RNA
gggggtgtagctcagt

SEQ ID NO: 66884 - RNA, 16 nt, Synthetic Construct
  source 1..16: mol_type = other RNA
ctcggtgggacctcca

SEQ ID NO: 66885 - RNA, 31 nt, Synthetic Construct; identical to SEQ ID NO: 7160
  source 1..31: mol_type = other RNA

SEQ ID NO: 66886 - RNA, 30 nt, Synthetic Construct; identical to SEQ ID NO: 1236
  source 1..30: mol_type = other RNA

SEQ ID NO: 66887 - RNA, 16 nt, Synthetic Construct
  source 1..16: mol_type = other RNA
cacgcagaaggtcctg

SEQ ID NO: 66888 - RNA, 16 nt, Synthetic Construct
  source 1..16: mol_type = other RNA
gtagtcgtggccgagt

SEQ ID NO: 66889 - RNA, 17 nt, Synthetic Construct
  source 1..17: mol_type = other RNA
acacgcagaaggtcctg

SEQ ID NO: 66890 - RNA, 22 nt, Synthetic Construct
  source 1..22: mol_type = other RNA
ggggatgtagctcagtggtaga

SEQ ID NO: 66891 - RNA, 31 nt, Synthetic Construct; identical to SEQ ID NO: 37496
  source 1..31: mol_type = other RNA

SEQ ID NO: 66892 - RNA, 30 nt, Synthetic Construct
  source 1..30: mol_type = other RNA
gggggtgtagctcagtggtagagcgcgtgc

SEQ ID NO: 66893 - RNA, 29 nt, Synthetic Construct
  source 1..29: mol_type = other RNA
tcccacatggtctagcggttaggattcct

SEQ ID NO: 66894 - RNA, 23 nt, Synthetic Construct
  source 1..23: mol_type = other RNA
gtagtcgtggccgagtggttaag

SEQ ID NO: 66895 - RNA, 18 nt, Synthetic Construct
  source 1..18: mol_type = other RNA
tctagtggtatgattctc

SEQ ID NO: 66896 - RNA, 21 nt, Synthetic Construct
  source 1..21: mol_type = other RNA
ccggagagggagcctgagaaa

SEQ ID NO: 66897 - RNA, 25 nt, Synthetic Construct
  source 1..25: mol_type = other RNA
gactcttagcggtggatcactcggc

SEQ ID NO: 66898 - RNA, 22 nt, Synthetic Construct
  source 1..22: mol_type = other RNA
ggggatgtagctcagtggtaga

SEQ ID NO: 66899 - RNA, 18 nt, Synthetic Construct
  source 1..18: mol_type = other RNA
ctggggatagagcattgc

SEQ ID NO: 66900 - RNA, 20 nt, Synthetic Construct
  source 1..20: mol_type = other RNA
ctggggatagagcattgcaa

SEQ ID NO: 66901 - RNA, 20 nt, Synthetic Construct
  source 1..20: mol_type = other RNA
aacagaccgaggacttgaat

SEQ ID NO: 66902 - RNA, 21 nt, Synthetic Construct
  source 1..21: mol_type = other RNA
aaccctggaatcggattgacc

SEQ ID NO: 66903 - RNA, 15 nt, Synthetic Construct
  source 1..15: mol_type = other RNA
aactttggtgcggcc

SEQ ID NO: 66904 - RNA, 30 nt, Synthetic Construct
  source 1..30: mol_type = other RNA
aagcaagcctacgctctgaatacattagca

SEQ ID NO: 66905 - RNA, 26 nt, Synthetic Construct
  source 1..26: mol_type = other RNA
aagcctacgctctgaatacattagca

SEQ ID NO: 66906 - RNA, 20 nt, Synthetic Construct
  source 1..20: mol_type = other RNA
aagcgggaagagctcaaatt

SEQ ID NO: 66907 - RNA, 30 nt, Synthetic Construct
  source 1..30: mol_type = other RNA
aagctcgtagttggatttgtggatgggtcg

SEQ ID NO: 66908 - RNA, 17 nt, Synthetic Construct
  source 1..17: mol_type = other RNA
aaggagtctaacatgta

SEQ ID NO: 66909 - RNA, 17 nt, Synthetic Construct
  source 1..17: mol_type = other RNA
aataccggatatgactc

SEQ ID NO: 66910 - RNA, 24 nt, Synthetic Construct
  source 1..24: mol_type = other RNA
aatgattggcggcctcgggggaga

SEQ ID NO: 66911 - RNA, 20 nt, Synthetic Construct
  source 1..20: mol_type = other RNA
aatggccgggactaagtagc

SEQ ID NO: 66912 - RNA, 26 nt, Synthetic Construct
  source 1..26: mol_type = other RNA
acatagcgacgttgctttttgatcct

SEQ ID NO: 66913 - RNA, 18 nt, Synthetic Construct
  source 1..18: mol_type = other RNA
accgggtgctgttgacat

SEQ ID NO: 66914 - RNA, 20 nt, Synthetic Construct
  source 1..20: mol_type = other RNA
acgctctgaatactttagca

SEQ ID NO: 66915 - RNA, 20 nt, Synthetic Construct
  source 1..20: mol_type = other RNA
acgctctgaatatattagca

SEQ ID NO: 66916 - RNA, 21 nt, Synthetic Construct
  source 1..21: mol_type = other RNA
acgggcagagctcaagtctcc

SEQ ID NO: 66917 - RNA, 17 nt, Synthetic Construct
  source 1..17: mol_type = other RNA
agaccgaggacttgaat

SEQ ID NO: 66918 - RNA, 21 nt, Synthetic Construct
  source 1..21: mol_type = other RNA
agccttggttgtgggatctgt

SEQ ID NO: 66919 - RNA, 20 nt, Synthetic Construct
  source 1..20: mol_type = other RNA
ataccgggtgctgttgacat

SEQ ID NO: 66920 - RNA, 22 nt, Synthetic Construct
  source 1..22: mol_type = other RNA
atcccgggttcgtaagatttgt

SEQ ID NO: 66921 - RNA, 25 nt, Synthetic Construct
  source 1..25: mol_type = other RNA
attaagccttggttgtgggatctgt

SEQ ID NO: 66922 - RNA, 19 nt, Synthetic Construct
  source 1..19: mol_type = other RNA
attcccggagccgacccca

SEQ ID NO: 66923 - RNA, 15 nt, Synthetic Construct
  source 1..15: mol_type = other RNA
cacgactctcggcaa

SEQ ID NO: 66924 - RNA, 27 nt, Synthetic Construct
  source 1..27: mol_type = other RNA
caggcctacgctctgaatatattagca

SEQ ID NO: 66925 - RNA, 20 nt, Synthetic Construct
  source 1..20: mol_type = other RNA
ccctgtagacgaaaacagcg

SEQ ID NO: 66926 - RNA, 25 nt, Synthetic Construct
  source 1..25: mol_type = other RNA
ccggaccttagttgctgtgctgtag

SEQ ID NO: 66927 - RNA, 16 nt, Synthetic Construct
  source 1..16: mol_type = other RNA
ccgggtgctgttggcc

SEQ ID NO: 66928 - RNA, 23 nt, Synthetic Construct
  source 1..23: mol_type = other RNA
cctaacagaccgaggacttgaat

SEQ ID NO: 66929 - RNA, 23 nt, Synthetic Construct
  source 1..23: mol_type = other RNA
cctacgctctgaatacattagca

SEQ ID NO: 66930 - RNA, 23 nt, Synthetic Construct
  source 1..23: mol_type = other RNA
cctacgctctgaatactttagca

SEQ ID NO: 66931 - RNA, 23 nt, Synthetic Construct
  source 1..23: mol_type = other RNA
cctgcgctctgaacattttagca

SEQ ID NO: 66932 - RNA, 15 nt, Synthetic Construct
  source 1..15: mol_type = other RNA
ccttcctcgtcgcca

SEQ ID NO: 66933 - RNA, 18 nt, Synthetic Construct
  source 1..18: mol_type = other RNA
ccttgggccgggtcggcc

SEQ ID NO: 66934 - RNA, 19 nt, Synthetic Construct
  source 1..19: mol_type = other RNA
cgaagaaccttacctggcc

SEQ ID NO: 66935 - RNA, 22 nt, Synthetic Construct
  source 1..22: mol_type = other RNA
cgacctactcgacccttcggcc

SEQ ID NO: 66936 - RNA, 19 nt, Synthetic Construct
  source 1..19: mol_type = other RNA
cgcaagattaaaactcaaa

SEQ ID NO: 66937 - RNA, 19 nt, Synthetic Construct
  source 1..19: mol_type = other RNA
cgctctgaatacattagca

SEQ ID NO: 66938 - RNA, 23 nt, Synthetic Construct
  source 1..23: mol_type = other RNA
cggaccgcctgaataatcgcgca

SEQ ID NO: 66939 - RNA, 25 nt, Synthetic Construct
  source 1..25: mol_type = other RNA
cgggaaaaggattggctctgagggt

SEQ ID NO: 66940 - RNA, 24 nt, Synthetic Construct
  source 1..24: mol_type = other RNA
cgggatgaaccgaaagtcgggtta

SEQ ID NO: 66941 - RNA, 15 nt, Synthetic Construct
  source 1..15: mol_type = other RNA
cgggttagtcgatcc

SEQ ID NO: 66942 - RNA, 25 nt, Synthetic Construct
  source 1..25: mol_type = other RNA
cggtcatttagaggaagtaaaagtc

SEQ ID NO: 66943 - RNA, 19 nt, Synthetic Construct
  source 1..19: mol_type = other RNA
cgtaagttctgaagtcccc

SEQ ID NO: 66944 - RNA, 27 nt, Synthetic Construct
  source 1..27: mol_type = other RNA
cgtaatgcgaattgcagaactccgtga

SEQ ID NO: 66945 - RNA, 22 nt, Synthetic Construct
  source 1..22: mol_type = other RNA
cgtgtactggtccggccgggcc

SEQ ID NO: 66946 - RNA, 22 nt, Synthetic Construct
  source 1..22: mol_type = other RNA
ctacgctctgaatacattagca

SEQ ID NO: 66947 - RNA, 22 nt, Synthetic Construct
  source 1..22: mol_type = other RNA
ctacgctctgaatactttagca

SEQ ID NO: 66948 - RNA, 15 nt, Synthetic Construct
  source 1..15: mol_type = other RNA
ctgaataatgttgca

SEQ ID NO: 66949 - RNA, 15 nt, Synthetic Construct
  source 1..15: mol_type = other RNA
ctgaatactttagca

SEQ ID NO: 66950 - RNA, 24 nt, Synthetic Construct
  source 1..24: mol_type = other RNA
ctgtaggattatgactgaacgcct

SEQ ID NO: 66951 - RNA, 25 nt, Synthetic Construct
  source 1..25: mol_type = other RNA
cttgctcgagggtcgtagaggagac

SEQ ID NO: 66952 - RNA, 19 nt, Synthetic Construct
  source 1..19: mol_type = other RNA
ctttcgaccggggatttgt

SEQ ID NO: 66953 - RNA, 25 nt, Synthetic Construct
  source 1..25: mol_type = other RNA
ctttgaacgcaagttgcgcccgagg

SEQ ID NO: 66954 - RNA, 17 nt, Synthetic Construct
  source 1..17: mol_type = other RNA
cttttgggtcttgtaat

SEQ ID NO: 66955 - RNA, 22 nt, Synthetic Construct
  source 1..22: mol_type = other RNA
gaataccgggtgctgttgactc

SEQ ID NO: 66956 - RNA, 25 nt, Synthetic Construct
  source 1..25: mol_type = other RNA
gaatcggattgaccggagatggggt

SEQ ID NO: 66957 - RNA, 22 nt, Synthetic Construct
  source 1..22: mol_type = other RNA
gaattccaccacgttcccgtgg

SEQ ID NO: 66958 - RNA, 17 nt, Synthetic Construct
  source 1..17: mol_type = other RNA
gacggaatagattagca

SEQ ID NO: 66959 - RNA, 27 nt, Synthetic Construct
  source 1..27: mol_type = other RNA
gacgttgataggctgggtgtggaagcg

SEQ ID NO: 66960 - RNA, 16 nt, Synthetic Construct
  source 1..16: mol_type = other RNA
gagatagggttggagc

SEQ ID NO: 66961 - RNA, 20 nt, Synthetic Construct
  source 1..20: mol_type = other RNA
gagtaggacaccgctggact

SEQ ID NO: 66962 - RNA, 24 nt, Synthetic Construct
  source 1..24: mol_type = other RNA
gatcaagttattaagggcttatgg

SEQ ID NO: 66963 - RNA, 24 nt, Synthetic Construct
  source 1..24: mol_type = other RNA
gcctacgctctgaatactttagca

SEQ ID NO: 66964 - RNA, 29 nt, Synthetic Construct
  source 1..29: mol_type = other RNA
gcggtcatgtatgacggaatagattagca

SEQ ID NO: 66965 - RNA, 19 nt, Synthetic Construct
  source 1..19: mol_type = other RNA
gggtgggctagagaactag

SEQ ID NO: 66966 - RNA, 19 nt, Synthetic Construct
  source 1..19: mol_type = other RNA
gtagctggtctgagaggac

SEQ ID NO: 66967 - RNA, 23 nt, Synthetic Construct
  source 1..23: mol_type = other RNA
gtcaagtgaataagagcatgtgg

SEQ ID NO: 66968 - RNA, 24 nt, Synthetic Construct
  source 1..24: mol_type = other RNA
gtctgcaactcgactacatgaagc

SEQ ID NO: 66969 - RNA, 17 nt, Synthetic Construct
  source 1..17: mol_type = other RNA
gtgaggccttgggactg

SEQ ID NO: 66970 - RNA, 27 nt, Synthetic Construct
  source 1..27: mol_type = other RNA
gtggcgtggacctacctctcctggcac

SEQ ID NO: 66971 - RNA, 20 nt, Synthetic Construct
  source 1..20: mol_type = other RNA
gtgggcggatttgctgagca

SEQ ID NO: 66972 - RNA, 21 nt, Synthetic Construct
  source 1..21: mol_type = other RNA
taacagaccgaggacttgaat

SEQ ID NO: 66973 - RNA, 22 nt, Synthetic Construct
  source 1..22: mol_type = other RNA
taaccctggaatcggattgacc

SEQ ID NO: 66974 - RNA, 21 nt, Synthetic Construct
  source 1..21: mol_type = other RNA
taacgaacgagaccttgacct

SEQ ID NO: 66975 - RNA, 28 nt, Synthetic Construct
  source 1..28: mol_type = other RNA
taatgacggtacctgaagaataagcacc

SEQ ID NO: 66976 - RNA, 21 nt, Synthetic Construct
  source 1..21: mol_type = other RNA
tacgctctgaatacattagca

SEQ ID NO: 66977 - RNA, 24 nt, Synthetic Construct
  source 1..24: mol_type = other RNA
tagcgaagttccttgtcgggtaag

SEQ ID NO: 66978 - RNA, 18 nt, Synthetic Construct
  source 1..18: mol_type = other RNA
tatattagcatggaataa

SEQ ID NO: 66979 - RNA, 18 nt, Synthetic Construct
  source 1..18: mol_type = other RNA
tcttcggacgctgacgag

SEQ ID NO: 66980 - RNA, 16 nt, Synthetic Construct
  source 1..16: mol_type = other RNA
tgaggccttgggactg

SEQ ID NO: 66981 - RNA, 28 nt, Synthetic Construct
  source 1..28: mol_type = other RNA
tgatagcacgactgttagcaaaacggaa

SEQ ID NO: 66982 - RNA, 20 nt, Synthetic Construct
  source 1..20: mol_type = other RNA
tgtggacttatattttatag

SEQ ID NO: 66983 - RNA, 23 nt, Synthetic Construct
  source 1..23: mol_type = other RNA
ttaagacagcaggacggtggcca

SEQ ID NO: 66984 - RNA, 23 nt, Synthetic Construct
  source 1..23: mol_type = other RNA
ttactgtaacttgaaattgaaat

SEQ ID NO: 66985 - RNA, 18 nt, Synthetic Construct
  source 1..18: mol_type = other RNA
ttagattgttctcttact

SEQ ID NO: 66986 - RNA, 24 nt, Synthetic Construct
  source 1..24: mol_type = other RNA
ttcgggttgtaaactgcttttgta

SEQ ID NO: 66987 - RNA, 18 nt, Synthetic Construct
  source 1..18: mol_type = other RNA
atcccggacgagccccca

SEQ ID NO: 66988 - RNA, 17 nt, Synthetic Construct
  source 1..17: mol_type = other RNA
atcccggacgagccccc

SEQ ID NO: 66989 - RNA, 17 nt, Synthetic Construct
  source 1..17: mol_type = other RNA
tcccggacgagccccca

SEQ ID NO: 66990 - RNA, 32 nt, Synthetic Construct; identical to SEQ ID NO: 1237
  source 1..32: mol_type = other RNA

SEQ ID NO: 66991 - RNA, 33 nt, Synthetic Construct
  source 1..33: mol_type = other RNA
gtttccgtagtgtagtggttatcacgttcgcct

SEQ ID NO: 66992 - RNA, 33 nt, Synthetic Construct
  source 1..33: mol_type = other RNA
gggccagtggcgcaatggataacgcgtctgact

SEQ ID NO: 66993 - RNA, 32 nt, Synthetic Construct
  source 1..32: mol_type = other RNA
ggctccgtggcgcaatggatagcgcattggac

SEQ ID NO: 66994 - RNA, 32 nt, Synthetic Construct
  source 1..32: mol_type = other RNA
gacctcgtggcgcaacggtagcgcgtctgact

SEQ ID NO: 66995 - RNA, 33 nt, Synthetic Construct
  source 1..33: mol_type = other RNA
gcttctgtagtgtagtggttatcacgttcgcct

SEQ ID NO: 66996 - RNA, 33 nt, Synthetic Construct
  source 1..33: mol_type = other RNA
gtttccgtagtgtagcggttatcacattcgcct

SEQ ID NO: 66997 - RNA, 32 nt, Synthetic Construct
  source 1..32: mol_type = other RNA
ggctcgttggtctaggggtatgattctcggtt

SEQ ID NO: 66998 - RNA, 20 nt, Synthetic Construct
  source 1..20: mol_type = other RNA
ttaacttgaccgctctgacc

SEQ ID NO: 66999 - RNA, 33 nt, Synthetic Construct; identical to SEQ ID NO: 494
  source 1..33: mol_type = other RNA

SEQ ID NO: 67000 - RNA, 34 nt, Synthetic Construct
  source 1..34: mol_type = other RNA
cgtttccgtagtgtagtggttatcacgttcgcct

SEQ ID NO: 67001 - RNA, 27 nt, Synthetic Construct
  source 1..27: mol_type = other RNA
cggggctacgcctgtctgagcgtcgct

SEQ ID NO: 67002 - RNA, 18 nt, Synthetic Construct
  source 1..18: mol_type = other RNA
gcctgtctgagcgtcgct

SEQ ID NO: 67003 - RNA, 26 nt, Synthetic Construct
  source 1..26: mol_type = other RNA
ggggctacgcctgtctgagcgtcgct

SEQ ID NO: 67004 - RNA, 23 nt, Synthetic Construct
  source 1..23: mol_type = other RNA
agctcggtctgaggcccctcagt

SEQ ID NO: 67005 - RNA, 24 nt, Synthetic Construct
  source 1..24: mol_type = other RNA
tgtaaacatccccgactggaagct

SEQ ID NO: 67006 - RNA, 23 nt, Synthetic Construct
  source 1..23: mol_type = other RNA
tactagactgaagctccttgagg

SEQ ID NO: 67007 - RNA, 23 nt, Synthetic Construct
  source 1..23: mol_type = other RNA
aaatcctctgtagacgacttaaa

SEQ ID NO: 67008 - RNA, 17 nt, Synthetic Construct
  source 1..17: mol_type = other RNA
aggactgtgtaacaact

SEQ ID NO: 67009 - RNA, 18 nt, Synthetic Construct
  source 1..18: mol_type = other RNA
agttggtccgagtgttgt

SEQ ID NO: 67010 - RNA, 19 nt, Synthetic Construct
  source 1..19: mol_type = other RNA
agttggtccgagtgttgtg

SEQ ID NO: 67011 - RNA, 28 nt, Synthetic Construct
  source 1..28: mol_type = other RNA
agttggtccgagtgttgtgggttattgt

SEQ ID NO: 67012 - RNA, 29 nt, Synthetic Construct
  source 1..29: mol_type = other RNA
agttggtccgagtgttgtgggttattgtt

SEQ ID NO: 67013 - RNA, 30 nt, Synthetic Construct
  source 1..30: mol_type = other RNA
agttggtccgagtgttgtgggttattgtta

SEQ ID NO: 67014 - RNA, 32 nt, Synthetic Construct
  source 1..32: mol_type = other RNA
agttggtccgagtgttgtgggttattgttaag

SEQ ID NO: 67015 - RNA, 33 nt, Synthetic Construct
  source 1..33: mol_type = other RNA
agttggtccgagtgttgtgggttattgttaaga

SEQ ID NO: 67016 - RNA, 34 nt, Synthetic Construct
  source 1..34: mol_type = other RNA
agttggtccgagtgttgtgggttattgttaagaa

SEQ ID NO: 67017 - RNA, 34 nt, Synthetic Construct
  source 1..34: mol_type = other RNA
agttggtccgagtgttgtgggttattgttaagtt

SEQ ID NO: 67018 - RNA, 15 nt, Synthetic Construct
  source 1..15: mol_type = other RNA
atcccggacgagccc

SEQ ID NO: 67019 - RNA, 20 nt, Synthetic Construct
  source 1..20: mol_type = other RNA
atcccggacgagcccccatt

SEQ ID NO: 67020 - RNA, 24 nt, Synthetic Construct
  source 1..24: mol_type = other RNA
cactagattgtgagctcctggaat

SEQ ID NO: 67021 - RNA, 22 nt, Synthetic Construct
  source 1..22: mol_type = other RNA
cactgctaaatttgactggctt

SEQ ID NO: 67022 - RNA, 25 nt, Synthetic Construct
  source 1..25: mol_type = other RNA
cccccactgctaaatttgactggct

SEQ ID NO: 67023 - RNA, 26 nt, Synthetic Construct
  source 1..26: mol_type = other RNA
cccccactgctaaatttgactggcta

SEQ ID NO: 67024 - RNA, 26 nt, Synthetic Construct
  source 1..26: mol_type = other RNA
cccccactgctaaatttgactggctc

SEQ ID NO: 67025 - RNA, 26 nt, Synthetic Construct
  source 1..26: mol_type = other RNA
cccccactgctaaatttgactggctt

SEQ ID NO: 67026 - RNA, 27 nt, Synthetic Construct
  source 1..27: mol_type = other RNA
cccccactgctaaatttgactggcttt

SEQ ID NO: 67027 - RNA, 28 nt, Synthetic Construct
  source 1..28: mol_type = other RNA
ccccccactgctaaaatttgactggctt

SEQ ID NO: 67028 - RNA, 26 nt, Synthetic Construct
  source 1..26: mol_type = other RNA
ccccccactgctaaatttgactggct

SEQ ID NO: 67029 - RNA, 27 nt, Synthetic Construct
  source 1..27: mol_type = other RNA
ccccccactgctaaatttgactggcta

SEQ ID NO: 67030 - RNA, 27 nt, Synthetic Construct
  source 1..27: mol_type = other RNA
ccccccactgctaaatttgactggctc

SEQ ID NO: 67031 - RNA, 27 nt, Synthetic Construct
  source 1..27: mol_type = other RNA
ccccccactgctaaatttgactggctt

SEQ ID NO: 67032 - RNA, 28 nt, Synthetic Construct
  source 1..28: mol_type = other RNA
ccccccactgctaaatttgactggctta

SEQ ID NO: 67033 - RNA, 28 nt, Synthetic Construct
  source 1..28: mol_type = other RNA
ccccccactgctaaatttgactggcttt

SEQ ID NO: 67034 - RNA, 29 nt, Synthetic Construct
  source 1..29: mol_type = other RNA
ccccccactgctaaatttgactggctttt

SEQ ID NO: 67035 - RNA, 27 nt, Synthetic Construct
  source 1..27: mol_type = other RNA
ccccccactgctaaattttactggctt

SEQ ID NO: 67036 - RNA, 34 nt, Synthetic Construct
  source 1..34: mol_type = other RNA
cccgtggccccccactgctaaatttgactggctt

SEQ ID NO: 67037 - RNA, 25 nt, Synthetic Construct
  source 1..25: mol_type = other RNA
ccgatggtagtgggttatcagaact

SEQ ID NO: 67038 - RNA, 20 nt, Synthetic Construct
  source 1..20: mol_type = other RNA
ccgtggccacgttcccgtgg

SEQ ID NO: 67039 - RNA, 33 nt, Synthetic Construct
  source 1..33: mol_type = other RNA
ccgtggccccccactgctaaatttgactggctt

SEQ ID NO: 67040 - RNA, 18 nt, Synthetic Construct
  source 1..18: mol_type = other RNA
ctctgtagacgacttaaa

SEQ ID NO: 67041 - RNA, 20 nt, Synthetic Construct
  source 1..20: mol_type = other RNA
ctgctaaatttgactggctt

SEQ ID NO: 67042 - RNA, 18 nt, Synthetic Construct
  source 1..18: mol_type = other RNA
ctgtacaactcttagcaa

SEQ ID NO: 67043 - RNA, 18 nt, Synthetic Construct
  source 1..18: mol_type = other RNA
gaatctgactgtctaatt

SEQ ID NO: 67044 - RNA, 28 nt, Synthetic Construct
  source 1..28: mol_type = other RNA
gaatctttgaacgcacattgcgcccgcc

SEQ ID NO: 67045 - RNA, 32 nt, Synthetic Construct
  source 1..32: mol_type = other RNA
gactggtccgatggtagtgggttatcagaact

SEQ ID NO: 67046 - RNA, 32 nt, Synthetic Construct; identical to SEQ ID NO: 7323
  source 1..32: mol_type = other RNA

SEQ ID NO: 67047 - RNA, 30 nt, Synthetic Construct
  source 1..30: mol_type = other RNA
gctggtccgatggtagtgggttatcagaac

SEQ ID NO: 67048 - RNA, 31 nt, Synthetic Construct
  source 1..31: mol_type = other RNA
gctggtccgatggtagtgggttatcagaact

SEQ ID NO: 67049 - RNA, 32 nt, Synthetic Construct
  source 1..32: mol_type = other RNA
gctggtccgatggtagtgggttatcagaactt

SEQ ID NO: 67050 - RNA, 28 nt, Synthetic Construct
  source 1..28: mol_type = other RNA
gcttctgtagtggttatcacgttcgcct

SEQ ID NO: 67051 - RNA, 32 nt, Synthetic Construct
  source 1..32: mol_type = other RNA
ggatggtccgatggtagtgggttatcagaact

SEQ ID NO: 67052 - RNA, 32 nt, Synthetic Construct
  source 1..32: mol_type = other RNA
ggcaggtccgatggtagtgggttatcagaact

SEQ ID NO: 67053 - RNA, 32 nt, Synthetic Construct
  source 1..32: mol_type = other RNA
ggccggtccgatggtagtgggttatcagaact

SEQ ID NO: 67054 - RNA, 32 nt, Synthetic Construct
  source 1..32: mol_type = other RNA
ggctctttggtctaggggtatgattctcgctt

SEQ ID NO: 67055 - RNA, 32 nt, Synthetic Construct
  source 1..32: mol_type = other RNA
ggctggaccgatggtagtgggttatcagaact

SEQ ID NO: 67056 - RNA, 32 nt, Synthetic Construct
  source 1..32: mol_type = other RNA
ggctggtcagatggtagtgggttatcagaact

SEQ ID NO: 67057 - RNA, 32 nt, Synthetic Construct
  source 1..32: mol_type = other RNA
ggctggtccgaaggtagtgggttatcagaact

SEQ ID NO: 67058 - RNA, 32 nt, Synthetic Construct
  source 1..32: mol_type = other RNA
ggctggtccgatagtagtgggttatcagaact

SEQ ID NO: 67059 - RNA, 32 nt, Synthetic Construct
  source 1..32: mol_type = other RNA
ggctggtccgatggaagtgggttatcagaact

SEQ ID NO: 67060 - RNA, 32 nt, Synthetic Construct
  source 1..32: mol_type = other RNA
ggctggtccgatggcagtgggttatcagaact

SEQ ID NO: 67061 - RNA, 32 nt, Synthetic Construct
  source 1..32: mol_type = other RNA
ggctggtccgatggtagagggttatcagaact

SEQ ID NO: 67062 - RNA, 32 nt, Synthetic Construct
  source 1..32: mol_type = other RNA
ggctggtccgatggtagcgggttatcagaact

SEQ ID NO: 67063 - RNA, 32 nt, Synthetic Construct
  source 1..32: mol_type = other RNA
ggctggtccgatggtagtaggttatcagaact

SEQ ID NO: 67064 - RNA, 32 nt, Synthetic Construct
  source 1..32: mol_type = other RNA
ggctggtccgatggtagtgagttatcagaact

SEQ ID NO: 67065 - RNA, 32 nt, Synthetic Construct
  source 1..32: mol_type = other RNA
ggctggtccgatggtagtgggttaacagaact

SEQ ID NO: 67066 - RNA, 32 nt, Synthetic Construct
  source 1..32: mol_type = other RNA
ggctggtccgatggtagtgggttataagaact

SEQ ID NO: 67067 - RNA, 31 nt, Synthetic Construct; identical to SEQ ID NO: 285
  source 1..31: mol_type = other RNA

SEQ ID NO: 67068 - RNA, 32 nt, Synthetic Construct
  source 1..32: mol_type = other RNA
ggctggtccgatggtagtgggttatcagaaca

SEQ ID NO: 67069 - RNA, 32 nt, Synthetic Construct
  source 1..32: mol_type = other RNA
ggctggtccgatggtagtgggttatcagaacc

SEQ ID NO: 67070 - RNA, 32 nt, Synthetic Construct
  source 1..32: mol_type = other RNA
ggctggtccgatggtagtgggttatcagaacg

SEQ ID NO: 67071 - RNA, 32 nt, Synthetic Construct; identical to SEQ ID NO: 161
  source 1..32: mol_type = other RNA

SEQ ID NO: 67072 - RNA, 33 nt, Synthetic Construct
  source 1..33: mol_type = other RNA
ggctggtccgatggtagtgggttatcagaactt

SEQ ID NO: 67073 - RNA, 34 nt, Synthetic Construct
  source 1..34: mol_type = other RNA
ggctggtccgatggtagtgggttatcagaactta

SEQ ID NO: 67074 - RNA, 35 nt, Synthetic Construct
  source 1..35: mol_type = other RNA
ggctggtccgatggtagtgggttatcagaacttat

SEQ ID NO: 67075 - RNA, 36 nt, Synthetic Construct
  source 1..36: mol_type = other RNA
ggctggtccgatggtagtgggttatcagaacttatt

SEQ ID NO: 67076 - RNA, 37 nt, Synthetic Construct
  source 1..37: mol_type = other RNA
ggctggtccgatggtagtgggttatcagaacttatta

SEQ ID NO: 67077 - RNA, 32 nt, Synthetic Construct
  source 1..32: mol_type = other RNA
ggctggtccgatggtagtgggttatcagaatt

SEQ ID NO: 67078 - RNA, 32 nt, Synthetic Construct
  source 1..32: mol_type = other RNA
ggctggtccgatggtagtgggttatcaggact

SEQ ID NO: 67079 - RNA, 32 nt, Synthetic Construct
  source 1..32: mol_type = other RNA
ggctggtccgatggtagtgggttatcagtact

SEQ ID NO: 67080 - RNA, 32 nt, Synthetic Construct
  source 1..32: mol_type = other RNA
ggctggtccgatggtagtgggttatcataact

SEQ ID NO: 67081 - RNA, 32 nt, Synthetic Construct
  source 1..32: mol_type = other RNA
ggctggtccgatggtagtgggttatcggaact

SEQ ID NO: 67082 - RNA, 31 nt, Synthetic Construct
  source 1..31: mol_type = other RNA
ggctggtccgatggtagtgggttattagaac

SEQ ID NO: 67083 - RNA, 32 nt, Synthetic Construct
  source 1..32: mol_type = other RNA
ggctggtccgatggtagtgggttattagaaca

SEQ ID NO: 67084 - RNA, 32 nt, Synthetic Construct
  source 1..32: mol_type = other RNA
ggctggtccgatggtagtgggttattagaact

SEQ ID NO: 67085 - RNA, 32 nt, Synthetic Construct
  source 1..32: mol_type = other RNA
ggctggtccgatggtagtggtttatcagaact

SEQ ID NO: 67086 - RNA, 32 nt, Synthetic Construct
  source 1..32: mol_type = other RNA
ggctggtccgatggtagtgtgttatcagaact

SEQ ID NO: 67087 - RNA, 32 nt, Synthetic Construct
  source 1..32: mol_type = other RNA
ggctggtccgatggtagttggttatcagaact

SEQ ID NO: 67088 - RNA, 32 nt, Synthetic Construct
  source 1..32: mol_type = other RNA
ggctggtccgatggttgtgggttatcagaact

SEQ ID NO: 67089 - RNA, 32 nt, Synthetic Construct
  source 1..32: mol_type = other RNA
ggctggtccgatgttagtgggttatcagaact

SEQ ID NO: 67090 - RNA, 32 nt, Synthetic Construct
  source 1..32: mol_type = other RNA
ggctggtccgattgtagtgggttatcagaact

SEQ ID NO: 67091 - RNA, 32 nt, Synthetic Construct
  source 1..32: mol_type = other RNA
ggctggtccgctggtagtgggttatcagaact

SEQ ID NO: 67092 - RNA, 31 nt, Synthetic Construct
  source 1..31: mol_type = other RNA
ggctggtccgttggtagtgggttatcagaac

SEQ ID NO: 67093 - RNA, 32 nt, Synthetic Construct
  source 1..32: mol_type = other RNA
ggctggtccgttggtagtgggttatcagaact

SEQ ID NO: 67094 - RNA, 32 nt, Synthetic Construct
  source 1..32: mol_type = other RNA
ggctggtcctatggtagtgggttatcagaact

SEQ ID NO: 67095 - RNA, 32 nt, Synthetic Construct
  source 1..32: mol_type = other RNA
ggctggtctgatggtagtgggttatcagaact

SEQ ID NO: 67096 - RNA, 32 nt, Synthetic Construct
  source 1..32: mol_type = other RNA
ggctggttcgatggtagtgggttatcagaact

SEQ ID NO: 67097 - RNA, 31 nt, Synthetic Construct
  source 1..31: mol_type = other RNA
ggctgttccgatggtagtgggttatcagaac

SEQ ID NO: 67098 - RNA, 32 nt, Synthetic Construct
  source 1..32: mol_type = other RNA
ggctgttccgatggtagtgggttatcagaact

SEQ ID NO: 67099 - RNA, 28 nt, Synthetic Construct
  source 1..28: mol_type = other RNA
ggcttggtctaggggtatgattctcggt

SEQ ID NO: 67100 - RNA, 32 nt, Synthetic Construct
  source 1..32: mol_type = other RNA
ggcttgtccgatggtagtgggttatcagaact

SEQ ID NO: 67101 - RNA, 20 nt, Synthetic Construct
  source 1..20: mol_type = other RNA
ggtagtgggttatcagaact

SEQ ID NO: 67102 - RNA, 27 nt, Synthetic Construct
  source 1..27: mol_type = other RNA
ggtccgatggtagtgggttatcagaac

SEQ ID NO: 67103 - RNA, 28 nt, Synthetic Construct
  source 1..28: mol_type = other RNA
ggtccgatggtagtgggttatcagaaca

SEQ ID NO: 67104 - RNA, 28 nt, Synthetic Construct
  source 1..28: mol_type = other RNA
ggtccgatggtagtgggttatcagaact

SEQ ID NO: 67105 - RNA, 32 nt, Synthetic Construct
  source 1..32: mol_type = other RNA
ggtccgatggtagtgggttatcagaacttatt

SEQ ID NO: 67106 - RNA, 32 nt, Synthetic Construct
  source 1..32: mol_type = other RNA
ggttggtccgatggtagtgggttatcagaact

SEQ ID NO: 67107 - RNA, 18 nt, Synthetic Construct
  source 1..18: mol_type = other RNA
gtagtgggttatcagaac

SEQ ID NO: 67108 - RNA, 19 nt, Synthetic Construct
  source 1..19: mol_type = other RNA
gtagtgggttatcagaact

SEQ ID NO: 67109 - RNA, 27 nt, Synthetic Construct
  source 1..27: mol_type = other RNA
gtccgatggtagtgggttatcagaact

SEQ ID NO: 67110 - RNA, 32 nt, Synthetic Construct
  source 1..32: mol_type = other RNA
gtctggtccgatggtagtgggttatcagaact

SEQ ID NO: 67111 - RNA, 26 nt, Synthetic Construct
  source 1..26: mol_type = other RNA
gttaaatcctctgtagacgacttaaa

SEQ ID NO: 67112 - RNA, 33 nt, Synthetic Construct
  source 1..33: mol_type = other RNA
gtttccgtagtgtagtggttatcacgttcgccg

SEQ ID NO: 67113 - RNA, 33 nt, Synthetic Construct
  source 1..33: mol_type = other RNA
gtttccttagtgtagtggttatcacgttcgcct

SEQ ID NO: 67114 - RNA, 33 nt, Synthetic Construct
  source 1..33: mol_type = other RNA
gtttctgtagtgtagtggttatcacgttcgcct

SEQ ID NO: 67115 - RNA, 27 nt, Synthetic Construct
  source 1..27: mol_type = other RNA
ncccccactgctaaatttgactggctt

SEQ ID NO: 67116 - RNA, 32 nt, Synthetic Construct
  source 1..32: mol_type = other RNA
ngctggtccgatggtagtgggttatcagaact

SEQ ID NO: 67117 - RNA, 33 nt, Synthetic Construct
  source 1..33: mol_type = other RNA
ntttccgtagtgtagtggttatcacgttcgcct

SEQ ID NO: 67118 - RNA, 24 nt, Synthetic Construct
  source 1..24: mol_type = other RNA
taaatcctctgtagacgacttaaa

SEQ ID NO: 67119 - RNA, 32 nt, Synthetic Construct; identical to SEQ ID NO: 828
  source 1..32: mol_type = other RNA

SEQ ID NO: 67120 - RNA, 18 nt, Synthetic Construct
  source 1..18: mol_type = other RNA
tagtgggttatcagaact

SEQ ID NO: 67121 - RNA, 25 nt, Synthetic Construct
  source 1..25: mol_type = other RNA
tattgcacttgtcccggcctgtaat

SEQ ID NO: 67122 - RNA, 25 nt, Synthetic Construct
  source 1..25: mol_type = other RNA
tattgcacttgtcccggcctgtagt

SEQ ID NO: 67123 - RNA, 24 nt, Synthetic Construct
  source 1..24: mol_type = other RNA
tattgcacttgtcccggcctgtat

SEQ ID NO: 67124 - RNA, 25 nt, Synthetic Construct
  source 1..25: mol_type = other RNA
tattgcacttgtcccggcctgtatt

SEQ ID NO: 67125 - RNA, 25 nt, Synthetic Construct
  source 1..25: mol_type = other RNA
tattgcacttgtcccggcctgttat

SEQ ID NO: 67126 - RNA, 27 nt, Synthetic Construct
  source 1..27: mol_type = other RNA
tcccccactgctaaatttgactggctt

SEQ ID NO: 67127 - RNA, 32 nt, Synthetic Construct; identical to SEQ ID NO: 1128
  source 1..32: mol_type = other RNA

SEQ ID NO: 67128 - RNA, 32 nt, Synthetic Construct
  source 1..32: mol_type = other RNA
tgctggtccgatggtagtgggttatcagaact

SEQ ID NO: 67129 - RNA, 33 nt, Synthetic Construct
  source 1..33: mol_type = other RNA
tggctggtccgatggtagtgggttatcagaact

SEQ ID NO: 67130 - RNA, 28 nt, Synthetic Construct
  source 1..28: mol_type = other RNA
tggtccgatggtagtgggttatcagaac
